(19) United States
(12) Patent Application Publication
(10) Pub. No.: US 2024/0110199 A1
(43) Pub. Date: Apr. 4, 2024

(54) NOVEL GENETIC LOCI ASSOCIATED WITH DISEASE RESISTANCE IN SOYBEANS

(71) Applicant: Syngenta Crop Protection AG, Basel (CH)

(72) Inventors: Qingli Liu, Research Triangle Park, NC (US); Thomas Joseph Curley, Jr., Research Triangle Park, NC (US); Becky Welsh Breitinger, Research Triangle Park, NC (US); Andrew David Farmer, Santa Fe, NM (US); Xiaoping Tan, Research Triangle Park, NC (US); Yinping Lucy Qin, Research Triangle Park, NC (US)

(73) Assignee: Syngenta Crop Protection AG, Basel (CH)

(21) Appl. No.: 18/264,857

(22) PCT Filed: Feb. 4, 2022
(86) PCT No.: PCT/US22/15172

§ 371 Date: Aug. 9, 2023

Related U.S. Application Data
(60) Provisional application No. 63/147,849, filed on Feb. 10, 2021.
(60) Provisional application No. 63/209,005, filed on Jun. 10, 2021.

(51) Int. Cl. C12N 15/82; A01H 6/54; C07K 14/415

(52) U.S. Cl. CPC C12N 15/8282; A01H 6/542; C07K 14/415

(57) ABSTRACT

The present invention relates to methods and compositions for identifying, selecting and/or producing a pathogen resistant plant or germplasm (e.g., soybean plant or germplasm) using genes derived from Glycine tomentella. Candidate genes capable of conferring pathogen resistance (e.g., to Asian Soy Rust) are provided. A plant or germplasm that has been identified, selected and/or produced by any of the methods of the present invention is also provided. Pathogen resistant seeds, plants and germplasms are also provided.

### RELATED APPLICATIONS

[0001] This application claims priority to US Provisional Patent Application Nos. 63/147,849 filed 10 Feb. 2021 and 63/209,005 filed 10 Jun. 2021, the contents of which are incorporated by reference herein in their entirety.

### FIELD OF THE INVENTION

[0002] The present invention relates to compositions and methods for identifying, selecting and producing enhanced disease and/or pathogen resistant plants using novel resistance genes.

### STATEMENT REGARDING ELECTRONIC SUBMISSION OF A SEQUENCE LISTING

[0003] A Sequence Listing in ASCII text format, submitted under 37 C.F.R. § 1.821, entitled “82250PCT_ST25.txt”, approximately ˜9.07 MB in size, generated on Jan. 7, 2022 and filed via EFS-Web is provided in lieu of a paper copy. This Sequence Listing is hereby incorporated by reference into the specification in its entirety.

### BACKGROUND

[0004] Plant pathogens are known to cause considerable damage to important crops, resulting in significant agricultural losses with widespread consequences for both the food supply and other industries that rely on plant materials. As such, applicant desires to reduce the incidence and/or impact of agricultural pathogens on crop production.

[0005] Several pathogens have been associated with damage to soybeans, which individually and collectively have the potential to cause significant yield losses in the United States and throughout the world. Exemplary pathogens include, but are not limited to fungi (e.g., genus Phytophthora and Asian Soybean rust Phakopsora pachyrhizi), nematodes (e.g., genus Meloidogyne, particularly, Meloidogyne javanica), and soybean stem canker. Given the significant threat to global food supplies that these pathogens present as well as the time and expense associated with treating soybean crops to prevent yield loss, new methods for producing pathogen resistant soybean cultivars are needed. What is needed is novel resistance genes (herein, “R-Genes”) that can be introduced into commercial soybean plants to control soybean pathogens.

### SUMMARY OF THE INVENTION

[0006] This summary lists several embodiments of the presently disclosed subject matter, and in many cases lists variations of these embodiments. Thus, in embodiments, it is an object of the presently disclosed subject matter to provide methods for conveying pathogen resistance into non-resistant plants and germplasm. Further, the presently disclosed subject matter provides novel Glycine max lines comprising in its genome a chromosome interval, loci, and/or gene that is derived from Glycine tomentella and confers pathogen resistance in said novel Glycine max line, which object is achieved in whole or in part by the presently disclosed subject matter.

[0007] In embodiments of the present invention, the plant or germplasm is a soybean plant or germplasm, and the pathogen is a soybean pathogen, particularly a soybean fungal pathogen such as Asian Soybean Rust (e.g., Phakopsora pachyrhizi; herein “ASR”).

[0008] The present invention provides for chromosomal intervals derived from Glycine tomentella, particularly accession line PI505267, that when introduced into a plant (e.g., a soybean plant such as Glycine max strain Williams 82 or an elite Glycine max line) are sufficient to confer increased rust resistance, such as increased Asian soybean rust (“ASR”) resistance, as compared to a control plant not comprising said chromosomal interval.

[0009] The invention also provides for novel proteins and nucleic acids derived from the chromosomal interval of Glycine tomentella accession line PI505267 that confer rust resistance. In embodiments of the present invention, the novel protein is the protein of SEQ ID NO: 5 or functional variants thereof, such as variants that are substantially similar (e.g., having at least 85%, at least 90% or at least 95% sequence identity) and that confer increased ASR resistance on a plant in which the protein is expressed. In further embodiments, nucleic acids comprising and/or encoding novel R-genes derived from the chromosomal interval of Glycine tomentella accession line PI505267 are provided that, when expressed in a plant, confer rust resistance. In embodiments, the nucleic acid comprises a nucleotide sequence encoding the novel protein of SEQ ID NO: 5, or functional variants thereof. In other embodiments, the nucleic acid comprises the nucleotide sequence of any of SEQ ID NOS: 2-4 and 11-12; or a sequence that is substantially similar and capable of conferring ASR resistance (such as sequences that have at least 85%, at least 90% or at least 95% sequence identity to any one of SEQ ID NOs: 2-4 and 11-12).

[0010] The present invention also provides for expression cassettes, vectors, and DNA constructs comprising the novel R-gene and/or encoding the novel protein of the invention. In embodiments, the expression cassette allows for transgenic expression of the novel nucleic acid and/or protein via a promoter operably connected thereto. In other embodiments, the DNA constructs allow for gene editing of the novel nucleic acid and/or protein.

[0011] The present invention also encompasses novel plants that have stably incorporated into their genome a novel nucleic acid sequence derived from the chromosomal interval of Glycine tomentella accession line PI505267 (such as a nucleic acid encoding the novel protein of SEQ ID NO: 5, or a substantially similar polypeptide) that confers the novel plant with increased pathogen resistance as compared to control plants not comprising the nucleic acid. In embodiments, the plants are novel Glycine max plants and/or novel elite Glycine max plants that have increased ASR resistance as compared to the control plants. In embodiments, the novel nucleic acid sequence is introduced into the plant through transgenic expression, through introgression, through known breeding methods, or through gene editing.

[0012] The present invention also provides for methods of producing plants having increased ASR resistance through the introduction of a nucleic acid sequence encoding the novel R-gene and/or protein of the invention. In particular embodiments, a method of producing a transgenic plant with improved resistance against ASR is provided by introducing a nucleic acid molecule comprising a nucleotide sequence encoding the novel protein (e.g., encoding the protein of SEQ ID NO: 5 or a substantially similar sequence, or comprising the nucleotide sequence of any of SEQ ID NOS: 2-4, 11-12, or a substantially similar sequence). In embodiments, the nucleic acid is introduced through an expression cassette comprising the nucleic acid sequence, the expression cassette introduced to a recipient plant to obtain a transgenic plant, wherein the transgenic plant has increased resistance against ASR compared to the recipient plant.

[0013] Compositions and methods for identifying, selecting and producing Glycine plants (including wild Glycines, elite Glycine lines and Glycine max lines) with enhanced pathogen (e.g., rust) resistance are provided. Pathogen resistant plants and germplasm (e.g., soybean plants and germplasms) are also provided. In some embodiments, methods of producing an ASR resistant soybean plant are provided.

[0014] In some embodiments, methods of identifying a rust resistant soybean plant or germplasm are provided. Such methods may comprise detecting, in the soybean plant or germplasm, a genetic loci or molecular marker (e.g. SNP or a Quantitative Trait Loci (QTL)) associated with enhanced disease resistance, in particular ASR resistance. In some embodiments the genetic loci or molecular marker associates with the presence of a chromosomal interval comprising the nucleotide sequence of SEQ ID NO 1, 2-4, 11, or 12, or a portion thereof, wherein the portion thereof associates with ASR resistance.

[0015] The foregoing and other objects and aspects of the present invention are explained in detail in the drawings and specification set forth below.

### BRIEF DESCRIPTION OF THE DRAWINGS

[0016] FIG. 1 is an illustration of binary vector 25845.

[0017] FIG. 2 is an illustration of binary vector 25899.

[0018] FIG. 3 shows photographs of rust bioassay experiments conducted on leaves collected from primary soybean events generated from constructs 25845 and 25899. The primary soybean events from both constructs (GVG01375963 of construct 25845 and GVG013773804 of construct 25899) show reddish brown lesions against all three rust populations tested (RTP1, BRS and SUL) while leaves from the control (which has the same genetic background without the transgene) show a tan reaction and heavy sporulation.

[0019] FIG. 4 is a table of disease resistance ratings of primary soybean events generated from construct 25845 and 25899 relative to the control. TO events, GVG01375963, generated from construct 25845, and GVG01373804, generated from 25899, repeatedly show high levels of disease resistance compared to the control (which comprises the same genetic background without the transgene). The results use standard soy rust rating scales with Reddish-brown (RB) types indicative of being resistant while Tan ratings are indicative of being susceptible. Numbers after the RB ratings are based on a combination of density of lesions or size of the lesions with a 1-4 scale from high to intermediate resistance, and indication of no sporulation (NSP) or very little sporulation (SPL). Numbers after Tan ratings are based on a combination of density of pustules and level of sporulation with 1-5 scale from low to high sporulation.

[0020] FIG. 5 is a graph showing relative expression (y-axis) of soybean rust β-tubulin gene on two events constructed from binary vector 25845 and 25899 at 14 days post inoculation with 3 rusts populations (SUL, BRS and RTP1). Levels of resistance were measured molecularly with fungal β-tubulin via qRT-PCR on the events GVG01375963 and GVG013773804 and compared to measurements of the control. The quantitative measurement is consistent with the phenotypic observations that the events showed high levels of resistance.

[0021] FIG. 6 is an illustration of binary vector 25992.

[0022] FIG. 7 is an illustration of binary vector 26015.

[0023] FIG. 8 is an illustration of binary vector 25950.

[0024] FIG. 9 shows photographs of rust bioassay experiments conducted on leaves collected from primary soybean events generated from construct 25950. Both the primary soybean events show reddish brown lesions against tested rust populations tested (RTP1, BRS and SUL) while leaves from the control (which has the same genetic background without the transgene) show a tan reaction and heavy sporulation. This indicates the strong resistance of the events to rust populations.

[0025] FIG. 10 is a graph showing relative expression (y-axis) of soybean rust β-tubulin gene on both the events constructed from binary vector 25950 at 14 days post inoculation with 3 rusts populations (SUL, BRS and RTP1). Levels of resistance were measured molecularly with fungal 3-tubulin via qRT-PCR on the events and compared to measurements of the control. Leaves from the TO events showed levels that were <1% of the susceptible controls. The quantitative measurement is consistent with the phenotypic observations that the events showed high levels of resistance.

[0026] FIG. 11 is a diagram depicting an example method of introgressing a genomic region associated with ASR resistance from G. tomentella into wild Glycine by doubling a G. max line that is ASR susceptible to create a tetraploid G. max line, and then crossing the tetraploid G. max line that is ASR susceptible with a diploid G. tomentella line that is ASR resistant. In some embodiments, the G. max line is an elite G. max line. In some embodiments, the introgressed genomic region is SEQ ID NO: 1 or a functional fragment thereof that confers increased ASR resistance. In some embodiments, the introgressed genomic region is any one of SEQ ID NOS: 2-4, 11-12.

### BRIEF DESCRIPTION OF THE SEQUENCE LISTING

[0027] SEQ ID NO: 1 is a chromosomal interval derived from Glycine tomentella line accession number PI505267, herein also referred to as “Contig 0133”. Contig 0133 has been mapped to G. tomentella (genotype D3) at an approximate interval of ˜9.28 MB-16.48 MB (that is was ˜33.8 Mbp in size) on chromosome 3. Genetic population mapping studies for PI505267 indicate that Glycine tomentella Chromosome 3 contains chromosomal intervals highly associated with ASR resistance (e.g., as corresponding to SEQ ID NO: 1). This chromosomal interval or portions thereof may be introduced (e.g., transgenically, through gene editing, and/or introgressed through use of embryo rescue & marker assisted breeding (MAB)) into Glycine max lines to create Glycine max lines resistant to various diseases such as ASR. In embodiments, “Contig 0133” is on Chromosome 3 in the span from position 3004342-36810588 of the reference genome.

[0028] Further research into the interval led to the discovery of a plurality of putative causative genes potentially associated with increased pathogen resistance trait (herein also referred to as R-genes). The putative genes from the above interval are located on or corresponding to Glycine tomentella Chromosome 3. Each of the causative genes were identified and isolated, their functions validated and their efficacy in resisting soybean pathogens were assessed. As elaborated in the Examples below, the chromosomal interval of SEQ ID NO: 1, derived from Glycine tomentella accession PI505267, can be used as a source for the R-genes corresponding to SEQ ID NOs: 2-5 and 7-8.

[0029] SEQ ID NO: 2 is a genomic DNA sequence of a soy rust resistance candidate gene (herein referred to as “GtoRG30”) from PI505267 encoding a protein containing Toll/Interleukin-1 receptor (TIR), nucleotide-binding site (NBS), and leucine rich-repeat (LRR) domains (herein, a “TNL” R-gene motif). The gene is syntenic to Glyma.05G165800 (Soy_william82_v2). The genomic DNA fragment has been mapped to an approximate interval of ˜11.44 MB-11.46 MB on chromosome 3 of G. tomentella. The genomic DNA sequence includes the gene with its native 5′UTR and 3′UTR and native introns.

[0030] SEQ ID NO: 3 is a genomic DNA sequence for soy rust resistance candidate gene GtoRG30 with its native 5′UTR and 3′UTR and with the first native intron replaced with Arabidopsis intron, iAtBAF60-01 (SEQ ID NO: 21).

[0031] SEQ ID NO: 4 is a DNA coding sequence for soy rust resistance candidate gene GtoRG30 that encodes a protein containing toll/interleukin receptor-1 (TIR), nucleotide-binding site (NBS), and leucine rich repeat (LRR) domains. The first native intron was replaced with Arabidopsis intron, iAtBAF60-01 (SEQ ID NO: 21).

[0032] SEQ ID NO: 5 is the amino acid sequence of the protein encoded by soy rust resistance candidate gene GtoRG30. The protein of SEQ ID NO: 5 is encoded by any of the nucleic acid sequences of SEQ ID NOS: 2-4 and 11-12.

[0033] SEQ ID NO: 6 is a genomic DNA sequence for a soy rust resistance candidate gene from PI505267 that encodes a protein comprising coiled-coiled (CC), nucleotide-binding site (NBS), and leucine rich repeat (LRR) domains (herein, a “CNL” R-gene motif).

[0034] SEQ ID NO: 7 is a genomic DNA sequence for another soy rust resistance candidate gene from PI505267 that encodes a protein comprising coiled-coiled (CC), nucleotide-binding site (NBS), and leucine rich repeat (LRR) domains. The genes of SEQ ID NOS. 6-7 are syntenic to Glyma.05G165600 (Soy_william82_v2).

[0035] SEQ ID NOS: 8-9 is the DNA sequence for a primer pair that can be used for generating an amplicon (such as via PCR) comprising the soy rust resistance candidate gene GtoRG30.

[0036] SEQ ID NO: 10 is the DNA sequence for a probe that can be used for detecting a polynucleotide, such as an amplicon, comprising soy rust resistance gene GtoRG30.

[0037] SEQ ID NO: 11 is a genomic DNA sequence (gGtoRG30-01) for soy rust resistance candidate gene GtoRG30 with its native promoter (SEQ ID NO: 15) and terminator (SEQ ID NO: 18) and with the first native intron replaced with Arabidopsis intron, iAtBAF60-01 (SEQ ID NO: 21).

[0038] SEQ ID NO: 12 is the cDNA sequence for soy rust resistance candidate gene GtoRG30.

[0039] SEQ ID NO: 13 is the DNA sequence of a promoter from the Medicago truncatula gene Mt12344. The promoter is active in plant cells and can be used to drive the expression of a heterologous nucleic acid sequence, such as any R-gene.

[0040] SEQ ID NO: 14 is the DNA sequence of a promoter from the Medicago truncatula gene Mt51186. The promoter is active in plant cells and can be used to drive the expression of a heterologous nucleic acid sequence, such as any R-gene.

[0041] SEQ ID NO: 15 is the DNA sequence of an endogenous promoter (“RG30_promoter”) from the soy rust resistance candidate gene herein referred to as “GtoRG30”. It consists of the 5′-non-transcribed sequence and the 5′ UTR (SEQ ID NO: 19) of the candidate gene.

[0042] SEQ ID NO: 16 is the DNA sequence of a terminator from the Medicago truncatula gene Mt12344.

[0043] SEQ ID NO: 17 is the DNA sequence of a terminator from the Medicago truncatula gene Mt51186. The promoter is active in plant cells and can be used to drive the expression of a heterologous nucleic acid sequence, such as any R-gene.

[0044] SEQ ID NO: 18 is the DNA sequence of an endogenous terminator (“RG30_terminator”) from the soy rust resistance candidate gene herein referred to as “GtoRG30”. It consists of the 3′-non-transcribed sequence and the 3′ UTR (SEQ ID NO: 20) of the candidate gene.

[0045] SEQ ID NO: 19 is the DNA sequence of the 5′ UTR from the soy rust resistance candidate gene herein referred to as “GtoRG30”.

[0046] SEQ ID NO: 20 is the DNA sequence of the 3′ UTR from the soy rust resistance candidate gene herein referred to as “GtoRG30”.

[0047] SEQ ID NO: 21 is the DNA sequence of intron iAtBAF60-01 of Arabidopsis thaliana BAF60 homolog.

[0048] ASR resistance can be introduced into G. max plants using a nucleic acid having a sequence encoding a polypeptide that is substantially identical to SEQ ID NO: 5 (e.g., having at least 70% sequence identity to SEQ ID NO: 5). For example, ASR resistance can be introduced through the introduction of a nucleic acid comprising any one of SEQ ID NOs: 2-4, 6-7, 11-12 or a nucleic acid sequence substantially identical to any one of SEQ ID NOS: 2-4, 6-7, and 11-12 (e.g., having at least 70% sequence identity).

[0049] SEQ ID NOS: 22-237, listed at Table 6, describe the DNA sequence of example assay components, including primers and probes, that can be used to detect and differentiate between favorable and unfavorable alleles associated with a given SNP position within the chromosomal interval of SEQ ID NO: 1.

### DETAILED DESCRIPTION OF THE INVENTION

[0050] The presently disclosed subject matter relates to compositions and methods for introducing novel resistance genes (herein “R-Genes”) encoding novel proteins for pathogen resistance into commercial plants to control plant pathogens. The methods involve transforming organisms with nucleic acid molecules having nucleotide sequences encoding the novel proteins for pathogen resistance of the invention. The nucleotide sequences of the invention are useful for generating plants, particularly soybean plants, that show increased resistance to plant pathogens, particularly fungal pathogens such as Asian Soybean Rust (herein, “ASR”). Thus, transformed plants, plant cells, plant tissues and seeds are provided. Compositions include nucleic acids and proteins relating to pathogen resistant plants as well as transformed plants, plant tissues and seeds. Nucleotide sequences of nucleic acids comprising the novel R-genes and/or encoding the amino acid sequence of the novel resistance proteins are disclosed. The sequences find use in the construction of vectors and expression cassettes for subsequent transformation into plants of interest, as probes and/or primers for the detection and isolation of the R-genes, and the like. In particular embodiments, the compositions and methods are used to introduce novel R-genes into soybean plants to control soybean pathogens, such as fungal pathogens (e.g., ASR) and/or nematodes.

[0051] This description is not intended to be a detailed catalog of all the different ways in which the invention may be implemented, or all the features that may be added to the instant invention. For example, features illustrated with respect to one embodiment may be incorporated into other embodiments, and features illustrated with respect to a particular embodiment may be deleted from that embodiment. Thus, the invention contemplates that in some embodiments of the invention, any feature or combination of features set forth herein can be excluded or omitted. In addition, numerous variations and additions to the various embodiments suggested herein will be apparent to those skilled in the art in light of the instant disclosure, which do not depart from the instant invention. Hence, the following descriptions are intended to illustrate some particular embodiments of the invention, and not to exhaustively specify all permutations, combinations and variations thereof.

[0052] All references listed below, as well as all references cited in the instant disclosure, including but not limited to all patents, patent applications and publications thereof, scientific journal articles, and database entries (e.g., GENBANK® database entries and all annotations available therein) are incorporated herein by reference in their entireties to the extent that they supplement, explain, provide a background for, or teach methodology, techniques, and/or compositions employed herein.

[0053] Nucleotide sequences provided herein are presented in the 5′ to 3′ direction, from left to right and are presented using the standard code for representing nucleotide bases as set forth in 37 CFR §§ 1.821-1.825 and the World Intellectual Property Organization (WIPO) Standard ST.25, for example: adenine (A), cytosine (C), thymine (T), and guanine (G).

[0054] Amino acids are likewise indicated using the WIPO Standard ST.25, for example: alanine (Ala; A), arginine (Arg; R), asparagine (Asn; N), aspartic acid (Asp; D), cysteine (Cys; C), glutamine (Gln; Q), glutamic acid (Glu; E), glycine (Gly; G), histidine (His; H), isoleucine (Ile; 1), leucine (Leu; L), lysine (Lys; K), methionine (Met; M), phenylalanine (Phe; F), proline (Pro; P), serine (Ser; S), threonine (Thr; T), tryptophan (Trp; W), tyrosine (Tyr; Y), and valine (Val; V).

### Definitions

[0055] Unless defined otherwise, all technical and scientific terms used herein have the same meaning as commonly understood to one of ordinary skill in the art to which the presently disclosed subject matter belongs.

[0056] Although the following terms are believed to be well understood by one of ordinary skill in the art, the following definitions are set forth to facilitate understanding of the presently disclosed subject matter.

[0057] As used in the description of the invention and the appended claims, the singular forms “a,” “an” and “the” are intended to include the plural forms as well, unless the context clearly indicates otherwise.

[0058] As used herein, “and/or” refers to and encompasses any and all possible combinations of one or more of the associated listed items, as well as the lack of combinations when interpreted in the alternative (“or”).

[0059] The term “about,” as used herein when referring to a measurable value such as a dosage or time period and the like, is meant to encompass variations of ±20%, ±10%, ±5%, ±1%, ±0.5%, or even ±0.1% of the specified amount. As used herein, phrases such as “between about X and Y” mean “between about X and about Y” and phrases such as “from about X to Y” mean “from about X to about Y.”

[0060] As used herein, phrases such as “between about X and Y”, “between about X and about Y”, “from X to Y” and “from about X to about Y” (and similar phrases) should be interpreted to include X and Y, unless the context indicates otherwise.

[0061] As used herein, a “coding sequence” or “CDS” is a nucleic acid sequence that is transcribed into RNA such as mRNA, rRNA, tRNA, snRNA, sense RNA or antisense RNA. In embodiments, the RNA is then translated to produce a protein. In example embodiments, the CDS is derived from a cDNA sequence and includes the sequence of spliced exons of a transcript in DNA notation and does not include any intron or 5′ or 3′-untranslated regions (UTRs). In other example embodiments, the CDS is derived from a genomic DNA sequence and includes the sequence of spliced exons of a transcript in DNA notation as well as one or more introns, and 5′ and/or 3′-untranslated regions (UTRs).

[0062] As used herein, a “codon optimized” nucleotide sequence means a nucleotide sequence of a recombinant, transgenic, or synthetic polynucleotide wherein the codons are chosen to reflect the particular codon bias that a host cell or organism may have. This is typically done in such a way so as to preserve the amino acid sequence of the polypeptide encoded by the codon optimized nucleotide sequence. In certain embodiments, a nucleotide sequence is codon optimized for the cell (e.g., an animal, plant, fungal or bacterial cell) in which the construct is to be expressed. For example, a construct to be expressed in a plant cell can have all or parts of its sequence codon optimized for expression in a plant. See, for example, U.S. Pat. No. 6,121,014. In embodiments, the polynucleotides of the invention are codon-optimized for expression in a plant cell (e.g., a dicot cell or a monocot cell) or bacterial cell.

[0063] The term “comprise”, “comprises” or “comprising,” when used in this specification, indicates the presence of the stated features, integers, steps, operations, elements, or components, but does not preclude the presence or addition of one or more other features, integers, steps, operations, elements, components, and/or groups thereof.

[0064] As used herein, the transitional phrase “consisting essentially of” (and grammatical variants) means that the scope of a claim is to be interpreted to encompass the specified materials or steps recited in the claim “and those that do not materially alter the basic and novel characteristic(s)” of the claimed invention. Thus, the term “consisting essentially of” when used in a claim of this invention is not intended to be interpreted to be equivalent to “comprising.”

[0065] The term “corresponding to” in the context of nucleic acid sequences or protein sequences means that when the nucleic acid sequences or amino acid sequences of certain sequences are aligned with each other, the nucleic acids or amino acids that “correspond to” certain enumerated positions in the present invention are those that align with these positions in a reference sequence, but that are not necessarily in these exact numerical positions relative to a particular nucleic acid sequence of the invention. Optimal alignment of sequences for comparison can be conducted by computerized implementations of known algorithms or by visual inspection. Readily available sequence comparison and multiple sequence alignment algorithms are, respectively, the Basic Local Alignment Search Tool (BLAST) and ClustalW/ClustalW2/Clustal Omega programs available on the Internet (e.g., the website of the EMBL-EBI). Other suitable programs include, but are not limited to, GAP, BestFit, Plot Similarity, and FASTA, which are part of the Accelrys GCG Package available from Accelrys, Inc. of San Diego, Calif., United States of America. See also Smith & Waterman, 1981; Needleman & Wunsch, 1970; Pearson & Lipman, 1988; Ausubel et al., 1988; and Sambrook & Russell, 2001.

[0066] Unless otherwise stated, identity and similarity will be calculated by the Needleman-Wunsch global alignment and scoring algorithms (Needleman and Wunsch (1970) J. Mol. Biol. 48(3):443-453) as implemented by the “needle” program, distributed as part of the EMBOSS software package (Rice, P. Longden, and Bleasby, A., EMBOSS: The European Molecular Biology Open Software Suite, 2000, Trends in Genetics 16, (6) pp 276-277, versions 6.3.1 available from EMBnet at embnet.org/resource/emboss and emboss.sourceforge.net, among other sources) using default gap penalties and scoring matrices (EBLOSUM62 for protein and EDNAFULL for DNA). Equivalent programs may also be used. By “equivalent program” is intended any sequence comparison program that, for any two sequences in question, generates an alignment having identical nucleotide residue matches and an identical percent sequence identity when compared to the corresponding alignment generated by needle from EMBOSS version 6.3.1.

[0067] Additional mathematical algorithms are known in the art and can be utilized for the comparison of two sequences. See, for example, the algorithm of Karlin and Altschul (1990) Proc. Natl. Acad. Sci. USA 87:2264, modified as in Karlin and Altschul (1993) Proc. Natl. Acad. Sci. USA 90:5873-5877. Such an algorithm is incorporated into the BLAST programs of Altschul et al. (1990) J. Mol. Biol. 215:403. BLAST nucleotide searches can be performed with the BLASTN program (nucleotide query searched against nucleotide sequences) to obtain nucleotide sequences homologous to nucleic acid molecules of the invention, or with the BLASTX program (translated nucleotide query searched against protein sequences) to obtain protein sequences homologous to nucleic acid molecules of the invention. BLAST protein searches can be performed with the BLASTP program (protein query searched against protein sequences) to obtain amino acid sequences homologous to protein molecules of the invention, or with the TBLASTN program (protein query searched against translated nucleotide sequences) to obtain nucleotide sequences homologous to protein molecules of the invention. To obtain gapped alignments for comparison purposes, Gapped BLAST (in BLAST 2.0) can be utilized as described in Altschul et al. (1997) Nucleic Acids Res. 25:3389. Alternatively, PSI-Blast can be used to perform an iterated search that detects distant relationships between molecules. See Altschul et al. (1997) supra. When utilizing BLAST, Gapped BLAST, and PSI-Blast programs, the default parameters of the respective programs (e.g., BLASTX and BLASTN) can be used. Alignment may also be performed manually by inspection.

[0068] “Expression cassette” as used herein means a nucleic acid molecule capable of directing expression of at least one polynucleotide of interest, such as a nucleic acid comprising the sequence of an R-gene polynucleotide that encodes a protein of the invention, the protein conferring increased pathogen resistance when expressed in an appropriate host cell, the expression cassette comprising a promoter operably linked to the polynucleotide of interest which is operably linked to a termination signal. An “expression cassette” also typically comprises additional polynucleotides to facilitate proper translation of the polynucleotide of interest. The expression cassette may also comprise other polynucleotides not related to the expression of a polynucleotide of interest but which are present due to convenient restriction sites for removal of the cassette from an expression vector. In embodiments, at least one of the components in the expression cassette may be heterologous (i.e., foreign) with respect to at least one of the other components (e.g., a heterologous promoter operatively associated with a polynucleotide of interest). The expression cassette may also be one that is naturally occurring but has been obtained in a recombinant form useful for heterologous expression. Typically, however, the expression cassette is heterologous with respect to the host, i.e., the expression cassette (or even the polynucleotide of interest) does not occur naturally in the host cell and has been introduced into the host cell or an ancestor cell thereof by a transformation process or a breeding process. The expression of the polynucleotide(s) of interest in the expression cassette is generally under the control of a promoter. The promoter may be a heterologous promoter or an endogenous (or native) promoter derived from the same source as the nucleic acid of interest. In the case of a multicellular organism, such as a plant, the promoter can also be specific or preferential to a particular tissue, or organ, or stage of development (as described in more detail herein). An expression cassette, or fragment thereof, can also be referred to as “inserted polynucleotide” or “insertion polynucleotide” when transformed into a plant.

[0069] The term “introduced” as used herein, in connection to a plant, means accomplished by any manner including but not limited to; introgression, transgenic, Clustered Regularly Interspaced Short Palindromic Repeats modification (CRISPR), Transcription activator-like effector nucleases (TALENs) (Feng et al. 2013, Joung & Sander 2013), meganucleases, or zinc finger nucleases (ZFNs).

[0070] As used herein, the term “wild glycine” refers to a perennial Glycine plant, for example any one of G. canescens, G. argyrea, G. clandestine, G. latrobeana, G. albicans, G. aphyonota, G. arenaria, G. curvata, G. cyrtoloba, G. dolichocarpa, G. falcate, G. gracei, G. hirticaulis, G. lactovirens, G. latifolia, G. microphylla, G. montis-douglas, G. peratosa, G. pescadrensis, G. pindanica, G. pullenii, G. rubiginosa, G. stenophita, G. syndetika, or G. tomentella.

[0071] As used herein, the term “allele” refers to one of two or more different nucleotides or nucleotide sequences that occur at a specific locus.

[0072] A marker is “associated with” a trait when it is linked to it and when the presence of the marker is an indicator of whether and/or to what extent the desired trait or trait form will occur in a plant/germplasm comprising the marker. Similarly, a marker is “associated with” an allele when it is linked to it and when the presence of the marker is an indicator of whether the allele is present in a plant/germplasm comprising the marker. For example, “a marker associated with enhanced pathogen resistance” refers to a marker whose presence or absence can be used to predict whether and/or to what extent a plant will display a pathogen resistant phenotype. In example embodiments of the present invention, a nucleic acid (e.g., a chromosomal interval) comprising the R-gene of interest and capable of conferring enhanced pathogen resistance may be detected, identified or selected based on the presence of a “favorable” marker, such as any of the favorable markers of Table 1 and/or 2.

[0073] A marker may be, but is not limited to, an allele, a gene, a haplotype, a restriction fragment length polymorphism (RFLP), a simple sequence repeat (SSR), random amplified polymorphic DNA (RAPD), cleaved amplified polymorphic sequences (CAPS) (Rafalski and Tingey, Trends in Genetics 9: 275 (1993)), an amplified fragment length polymorphism (AFLP) (Vos et al., Nucleic Acids Res. 23: 4407 (1995)), a single nucleotide polymorphism (SNP) (Brookes, Gene 234: 177 (1993)), a sequence-characterized amplified region (SCAR) (Paran and Michelmore, Theor. Appl. Genet. 85: 985 (1993)), a sequence-tagged site (STS) (Onozaki et al., Euphytica 138: 255 (2004)), a single-stranded conformation polymorphism (SSCP) (Orita et al., Proc. Natl. Acad. Sci. USA 86: 2766 (1989)), an inter-simple sequence repeat (ISSR) (Blair et al., Theor. Appl. Genet. 98: 780 (1999)), an inter-retrotransposon amplified polymorphism (IRAP), a retrotransposon-microsatellite amplified polymorphism (REMAP) (Kalendar et al., Theor. Appl. Genet. 98: 704 (1999)), a chromosome interval, or an RNA cleavage product (such as a Lynx tag). A marker may be present in genomic or expressed nucleic acids (e.g., ESTs). The term marker may also refer to nucleic acids used as probes or primers (e.g., primer pairs) for use in amplifying, hybridizing to and/or detecting nucleic acid molecules according to methods well known in the art (e.g., using PCR). A large number of soybean molecular markers are known in the art, and are published or available from various sources, such as the SoyBase internet resource.

[0074] Markers corresponding to genetic polymorphisms between members of a population can be detected by methods well-established in the art. These include, e.g., nucleic acid sequencing, hybridization methods, amplification methods (e.g., PCR-based sequence specific amplification methods), detection of restriction fragment length polymorphisms (RFLP), detection of isozyme markers, detection of polynucleotide polymorphisms by allele specific hybridization (ASH), detection of amplified variable sequences of the plant genome, detection of self-sustained sequence replication, detection of simple sequence repeats (SSRs), detection of single nucleotide polymorphisms (SNPs), and/or detection of amplified fragment length polymorphisms (AFLPs). Well established methods are also known for the detection of expressed sequence tags (ESTs) and SSR markers derived from EST sequences and randomly amplified polymorphic DNA (RAPD).

[0075] A “marker allele” also described as an “allele of a marker locus” can refer to one of a plurality of polymorphic nucleotide sequences found at a marker locus in a population that is polymorphic for the marker locus.

[0076] “Marker-assisted selection” (MAS) is a process by which phenotypes are selected based on marker genotypes. In some embodiments, marker genotypes are used to identify plants that will be selected for a breeding program or for planting. In some embodiments, marker genotypes are used to identify plants that will not be selected for a breeding program or for planting (i.e., counter-selected plants), allowing them to be removed from the breeding/planting population.

[0077] As used herein, the terms “marker locus” and “marker loci” refer to a specific chromosome location or locations in the genome of an organism where a specific marker or markers can be found. A marker locus can be used to track the presence of a second linked locus, e.g., a linked locus that encodes or contributes to expression of a phenotypic trait. For example, a marker locus can be used to monitor segregation of alleles at a locus, such as a QTL or single gene, that are genetically or physically linked to the marker locus.

[0078] As used herein, the terms “marker probe” and “probe” refer to a nucleotide sequence or nucleic acid molecule that can be used to detect the presence of one or more particular alleles within a marker locus (e.g., a nucleic acid probe that is complementary to all of or a portion of the marker or marker locus, through nucleic acid hybridization). Marker probes comprising about 8, 10, 15, 20, 30, 40, 50, 60, 70, 80, 90, 100 or more contiguous nucleotides may be used for nucleic acid hybridization. Alternatively, in some aspects, a marker probe refers to a probe of any type that is able to distinguish (i.e., genotype) the particular allele that is present at a marker locus.

[0079] As used herein, the terms “molecular marker” or “genetic marker” may be used to refer to a genetic marker, as defined above, or an encoded product thereof (e.g., a protein) used as a point of reference when identifying a linked locus. A molecular marker can be derived from genomic nucleotide sequences or from expressed nucleotide sequences (e.g., from a spliced RNA, a cDNA, etc.). The term also refers to nucleotide sequences complementary to or flanking the marker sequences, such as nucleotide sequences used as probes and/or primers capable of amplifying the marker sequence. Nucleotide sequences are “complementary” when they specifically hybridize in solution, e.g., according to Watson-Crick base pairing rules. Some of the markers described herein are also referred to as hybridization markers when located on an indel region. Thus, the marker need only indicate whether the indel region is present or absent. Any suitable marker detection technology may be used to identify such a hybridization marker, e.g., SNP technology is used in the examples provided herein.

[0080] As used herein, the terms “backcross” and “backcrossing” refer to the process whereby a progeny plant is repeatedly crossed back to one of its parents. In a backcrossing scheme, the “donor” parent refers to the parental plant with the desired gene or locus to be introgressed. The “recipient” parent (used one or more times) or “recurrent” parent (used two or more times) refers to the parental plant into which the gene or locus is being introgressed. For example, see Ragot, M. et al. Marker-assisted Backcrossing: A Practical Example, in TECHNIQUES ET UTILISATIONS DES MARQUEURS MOLECULAIRES LES COLLOQUES, Vol. 72, pp. 45-56 (1995); and Openshaw et al., Marker-assisted Selection in Backcross Breeding, in PROCEEDINGS OF THE SYMPOSIUM “ANALYSIS OF MOLECULAR MARKER DATA,” pp. 41-53 (1994). The initial cross gives rise to the F1 generation. The term “BC1” refers to the second use of the recurrent parent, “BC2” refers to the third use of the recurrent parent, and so on.

[0081] A centimorgan (“cM”) is a unit of measure of recombination frequency. One cM is equal to a 1% chance that a marker at one genetic locus will be separated from a marker at a second locus due to crossing over in a single generation.

[0082] As used herein, the term “chromosomal interval defined by and including,” used in reference to particular loci and/or alleles, refers to a chromosomal interval delimited by and encompassing the stated loci/alleles.

[0083] As used herein, the terms “cross” or “crossed” refer to the fusion of gametes via pollination to produce progeny (e.g., cells, seeds or plants). The term encompasses both sexual crosses (the pollination of one plant by another) and selfing (self-pollination, e.g., when the pollen and ovule are from the same plant). The term “crossing” refers to the act of fusing gametes via pollination to produce progeny.

[0084] As used herein, the terms “cultivar” and “variety” refer to a group of similar plants that by structural or genetic features and/or performance can be distinguished from other varieties within the same species.

[0085] As used herein, the terms “desired allele”, “favorable allele” and “allele of interest” are used interchangeably to refer to an allele associated with a desired trait (e.g. ASR resistance). In example embodiments, the desired allele may be detected or identified via marker based assays, such as using a SNP marker assay.

[0086] As used herein, the terms “enhanced pathogen resistance”, “enhanced disease resistance”, and “conferring or enhancing resistance to a pathogen” refers to an improvement, enhancement, or increase in a plant's ability to endure and/or thrive despite being infected with a pathogen or disease (e.g. Asian soybean rust) as compared to one or more control plants (e.g., one or both of the parents, or a plant lacking a nucleic acid comprising an R-gene or marker associated with enhanced pathogen resistance to respective pathogen/disease). An enhanced plant pathogen resistance comprises any statistically significant increase in resistance to the plant pathogen, including, for example, an increase of at least 1%, 5%, 10%, 20%, 30%, 40%, 50%, 60%, 70%, 80%, 90%, 100% or higher. The control plants may be fully susceptible to the pathogen or have limited resistance to the pathogen. Enhanced disease resistance includes any mechanism (other than whole-plant immunity or resistance) that reduces the expression of symptoms indicative of infection for a respective disease such as Asian soybean rust, soybean cyst nematode, Phytophthora, etc. Conferring or enhancing of resistance may include a reduction (partial reduction or complete reduction) in symptoms or phenotypic characteristics associated with susceptibility to the pathogen and/or an increase in phenotypic characteristics associated with resistance to the pathogen. In example embodiments, conferring or increasing of resistance to Asian Soy Rust can include a reduction in the number, size, and/or density of lesions, change in the color of lesions (such as from a tan coloration to a reddish brown coloration), reduction in number and density of pustule formation, reduction in sporulation, or any combination thereof.

[0087] In embodiments, the nucleic acid of the present invention, encoding a protein conferring enhanced pathogen resistance when expressed in a plant cell, herein also referred to as a resistance gene or R-gene, can used to enhance pathogen resistance to a fungal pathogen and/or a nematode. As non-limiting examples, the R-gene of the present invention can be used to enhance resistance to: soy cyst nematode, bacterial pustule, root knot nematode, frog eye leaf spot, phytophthora, brown stem rot, nematode, Asian Soybean Rust, smut, Golovinomyces cichoracearum, Erysiphe cichoracearum, Blumeria graminis, Podosphaera xanthii, Sphaerotheca fuliginea, Pythium ultimum, Uncinula necator, Mycosphaerella pinodes, Magnaporthe grisea, Bipolaris oryzae, Magnaporthe grisea, Rhizoctonia solani, Phytophthora sojae, Schizaphis graminum, Bemisia tabaci, Rhopalosiphum maidis, Deroceras reticulatum, Diatraea saccharalis, Schizaphis graminum, Myzus persicae, Sclerotinia sclerotiorum, Macrophomina phaseolina, or Fusarium virguliforme.

[0088] An “elite line” or “elite strain” is an agronomically superior line that has resulted from many cycles of breeding and selection for superior agronomic performance. Numerous elite lines are available and known to those of skill in the art of soybean breeding. An “elite population” is an assortment of elite individuals or lines that can be used to represent the state of the art in terms of agronomically superior genotypes of a given crop species, such as soybean. Similarly, an “elite germplasm” or elite strain of germplasm is an agronomically superior germplasm, typically derived from and/or capable of giving rise to a plant with superior agronomic performance, such as an existing or newly developed elite line of soybean.

[0089] An “elite” plant is any plant from an elite line, such that an elite plant is a representative plant from an elite variety. Non-limiting examples of elite soybean varieties that are commercially available to farmers or soybean breeders include: AG00802, A0868, AG0902, A1923, AG2403, A2824, A3704, A4324, A5404, AG5903, AG6202 AG0934; AG1435; AG2031; AG2035; AG2433; AG2733; AG2933; AG3334; AG3832; AG4135; AG4632; AG4934; AG5831; AG6534; and AG7231 (Asgrow Seeds, Des Moines, Iowa, USA); BPR0144RR, BPR 4077NRR and BPR 4390NRR (Bio Plant Research, Camp Point, Ill., USA); DKB17-51 and DKB37-51 (DeKalb Genetics, DeKalb, Ill., USA); DP 4546 RR, and DP 7870 RR (Delta & Pine Land Company, Lubbock, Tex., USA); JG 03R501, JG 32R606C ADD and JG 55R503C (JGL Inc., Greencastle, Ind., USA); NKS 13-K2 (NK Division of Syngenta Seeds, Golden Valley, Minnesota, USA); 90M01, 91M30, 92M33, 93M11, 94M30, 95M30, 97B52, P008T22R2; P16T17R2; P22T69R; P25T51R; P34T07R2; P35T58R; P39T67R; P47T36R; P46T21R; and P56T03R2 (Pioneer Hi-Bred International, Johnston, Iowa, USA); SG4771NRR and SG5161NRR/STS (Soygenetics, LLC, Lafayette, Ind., USA); S00-K5, S11-L2, S28-Y2, S43-B1, S53-A1, S76-L9, S78-G6, S0009-M2; S007-Y4; S04-D3; S14-A6; S20-T6; S21-M7; S26-P3; S28-N6; S30-V6; S35-C3; S36-Y6; S39-C4; S47-K5; S48-D9; S52-Y2; S58-Z4; S67-R6; S73-S8; and S78-G6 (Syngenta Seeds, Henderson, Ky., USA); Richer (Northstar Seed Ltd. Alberta, CA); 14RD62 (Stine Seed Co. Ia., USA); or Armor 4744 (Armor Seed, LLC, Ar., USA).

[0090] The terms “agronomically elite” as used herein, means a genotype that has a culmination of many distinguishable traits such as emergence, vigor, vegetative vigor, disease resistance, seed set, standability, yield and threshability which allows a producer to harvest a product of commercial significance.

[0091] A “native” or “wild type” nucleic acid, nucleotide sequence, polypeptide or amino acid sequence refers to a naturally occurring or endogenous nucleic acid, nucleotide sequence, polypeptide or amino acid sequence. Thus, for example, a “wild type mRNA” is an mRNA that is naturally occurring in, or endogenous to, the organism.

[0092] The terms “nucleic acid,” “nucleic acid molecule,” “nucleotide sequence,” “oligonucleotide”, “polynucleic acids” and “polynucleotide” are used interchangeably herein, unless the context indicates otherwise, and refer to a heteropolymer of nucleotides. These terms include without limitation DNA and RNA molecules, including cDNA, genomic DNA, synthetic (e.g., chemically synthesized) DNA and RNA, plasmid DNA, mRNA, anti-sense RNA, and RNA/DNA hybrids, any of which can be linear or branched, single stranded or double stranded, or a combination thereof. When dsRNA is produced synthetically, less common bases, such as inosine, 5-methylcytosine, 6-methyladenine, hypoxanthine and others can also be used for antisense, dsRNA, and ribozyme pairing. For example, polynucleotides that contain C-5 propyne analogues of uridine and cytidine have been shown to bind RNA with high affinity and to be potent antisense inhibitors of gene expression. Other modifications, such as modification to the phosphodiester backbone, or the 2′-hydroxy in the ribose sugar group of the RNA can also be made. In embodiments, the “nucleic acid,” “nucleic acid molecule,”, “nucleotide sequence,”, “oligonucleotide” or “polynucleotide” refer to DNA.

[0093] By “operably linked” or “operably associated” as used herein, it is meant that the indicated elements are functionally related to each other and are also generally physically related. Thus, the term “operably linked” or “operably associated” as used herein, refers to nucleotide sequences on a single nucleic acid molecule that are functionally associated. Thus, a first nucleotide sequence that is operably linked to a second nucleotide sequence, means a situation when the first nucleotide sequence is placed in a functional relationship with the second nucleotide sequence. For instance, a promoter is operably associated with a nucleotide sequence if the promoter effects the transcription or expression of said nucleotide sequence. Those skilled in the art will appreciate that the control sequences (e.g., promoter) need not be contiguous with the nucleotide sequence to which it is operably associated, as long as the control sequences function to direct the expression thereof. Thus, for example, intervening untranslated, yet transcribed, sequences can be present between a promoter and a nucleotide sequence, and the promoter can still be considered “operably linked” to or “operatively associated” with the nucleotide sequence.

[0094] As used herein, the terms “disease tolerance” and “disease resistant” refer to a plant's ability to endure and/or thrive despite being infected with a respective disease. When used in reference to germplasm, the terms refer to the ability of a plant that arises from that germplasm to endure and/or thrive despite being infected with a respective disease. In some embodiments, infected disease resistant soybean plants may yield as well (or nearly as well) as uninfected soybean plants. In general, a plant or germplasm is labeled as “Disease resistant” if it displays “enhanced pathogen resistance.”

[0095] As used herein, the term “endogenous” or “native” refers to materials originating from within an organism or cell. In contrast, “heterogenous” or “heterologous” or “exogenous” refers to materials not originating naturally from within the organism or cell, due to modifications being artificially introduced to their endogenous state. This typically applies to nucleic acid molecules used in producing transformed or transgenic host cells and plants. For example, a nucleic acid molecule comprising the R-gene of the present invention is an exogenous nucleic acid used to confer or enhance pathogen resistance in a plant cell transformed with the nucleic acid molecule.

[0096] As used herein, the terms “exotic,” “exotic line” and “exotic germplasm” refer to any plant, line or germplasm that is not elite. In general, exotic plants/germplasms are not derived from any known elite plant or germplasm, but rather are selected to introduce one or more desired genetic elements into a breeding program (e.g., to introduce novel alleles into a breeding program).

[0097] As used herein, a “genetic map” is a description of genetic linkage relationships among loci on one or more chromosomes within a given species, generally depicted in a diagrammatic or tabular form. For each genetic map, distances between loci are measured by the recombination frequencies between them. Recombinations between loci can be detected using a variety of markers. A genetic map is a product of the mapping population, types of markers used, and the polymorphic potential of each marker between different populations. The order and genetic distances between loci can differ from one genetic map to another.

[0098] As used herein, the term “genome” as it applies to plant cells encompasses not only chromosomal DNA found within the nucleus, but organelle DNA found within subcellular components of the cell.

[0099] The term “gene” or “genomic sequence” means a nucleic acid that comprises chromosomal DNA, genomic DNA, plasmid DNA, cDNA, an artificial DNA polynucleotide, or other DNA encoding a polypeptide of interest. In particular embodiments, the nucleic acid sequence of the gene encodes a protein that, when expressed, is responsible, at least in part, for a particular characteristic or trait. In embodiments, the gene may be native, modified (e.g., by directed recombination or site-specific mutation), or synthetic. In example embodiments, the gene is transcribed into an RNA molecule (e.g., an mRNA) in a cell wherein the RNA may encode a peptide, polypeptide, or protein of interest, and in some examples may also encode genetic elements flanking the coding sequence that are involved in the regulation of expression of the mRNA or polypeptide of the present invention. A gene may thus comprise several operably linked sequences, such as a promoter sequence, a 5′ leader sequence comprising, for example, sequences involved in translation initiation, a (protein) coding region (comprising cDNA or genomic DNA), a 3′ non-translated sequence comprising, for example, transcription termination sequence sites, introns (e.g., one or more native, foreign, or modified introns). In example embodiments, the nucleic acid sequence of the isolated gene may include introns, exons, 5′ or 3′-untranslated regions (UTRs), and native regulatory elements (such as native promoters). In other example embodiments, the gene comprises a coding sequence for a polypeptide of interest without including any regulatory elements (e.g., without any native or foreign introns, with some native introns replaced with foreign or modified introns, without any untranslated sequences, or with native regulatory elements replaced with foreign, heterologous or modified regulatory elements).

[0100] A “fragment” of a gene or nucleic acid is a portion of a full-length nucleic acid molecule that is of at least a minimum length capable of transcription into an RNA, translation into a peptide, or useful as a probe or primer in a DNA detection method. A “functional fragment” of a gene or nucleic acid is a portion of the full-length nucleic acid molecule that is capable of performing the same function as the full-length nucleic acid molecule. In embodiments, a functional fragment of a chromosomal interval that confers increased pathogen resistance includes a gene derived from the chromosomal interval.

[0101] The terms “nucleic acid,” “nucleic acid molecule,” and “polynucleotide” are used interchangeably herein. In embodiments, the gene is a segment of single-stranded, double-stranded or partially double-stranded DNA or RNA, or a hybrid thereof, that can be isolated or synthesized from any source. In the context of the present disclosure, the gene is typically a segment of DNA. In some embodiments, the gene of the disclosure includes isolated nucleic acid molecules. In some embodiments, the gene of the disclosure is comprised within a vector, expression cassette, a plant, or a plant cell.

[0102] As used herein, in particular embodiments, “R-gene” or “Resistance gene” refers to a nucleic acid having a nucleotide sequence (e.g., DNA sequence) encoding a polypeptide of interest, R-protein, or Resistance protein, that when expressed in a plant cell, confers to the plant cell, and/or the plant comprising the plant cell, with increased resistance to one or more plant pathogens. For example, in embodiments, the R-gene(s) of the present disclosure encode polypeptides or R-proteins that, when expressed in a soybean plant cell, confer the soybean plant with resistance to at least Asian Soybean Rust. In embodiments, the R-gene may comprise one or more motifs that correlate with one or more domains of the corresponding R-protein. For example, embodiments of the R-gene may comprise a TNL motif comprising a Toll/Interleukin-1 receptor (TIR) motif, a nucleotide-binding site (NBS), and a leucine rich-repeat (LRR) motif. When expressed, the TNL motif encodes a TNL motif in the R-protein comprising a Toll/Interleukin-1 receptor (TIR) domain a nucleotide-binding site (NBS) domain, and a leucine rich-repeat (LRR) domain. In other embodiments, the R-gene may comprise a CNL motif comprising a coiled coil (CC) motif, a nucleotide-binding site (NBS), and a leucine rich-repeat (LRR) motif. When expressed, the CNL motif encodes a CNL motif in the R-protein comprising a coiled coil (CC) domain, a nucleotide-binding site (NBS) domain, and a leucine rich-repeat (LRR) domain. The R-gene may comprise still other domains and motifs, such as a WRKY motif. In embodiments, the nucleic acid sequence of the R-gene is derived from a wild plant exhibiting increased resistance to the pathogen and includes, at least a coding sequence encoding the R-protein. The nucleic acid sequence of the R-gene may further comprise nucleic acid sequences corresponding to one or more native regulatory elements (such as native introns, native promoters, native UTRs), one or more heterologous regulatory elements (such as a heterologous promoter and introns), and combinations thereof. Insertion of the R-gene into a plant that has decreased resistance to the pathogen (e.g., no resistance or partially or fully susceptible), at a chromosomal location (e.g., stably integrated into the plant genome) or extra-chromosomal location (e.g., on a vector or plasmid) results in conferring of the wild plant-derived pathogen resistance to the recipient plant. For example, in representative embodiments, an R-gene of the present invention is derived from Glycine tomentella and can be inserted into Glycine max plants to confer or enhance resistance of G. max plants to Asian Soy Rust.

[0103] As used herein, the term “genotype” refers to the genetic constitution of an individual (or group of individuals) at one or more genetic loci, as contrasted with the observable and/or detectable and/or manifested trait (the phenotype). Genotype is defined by the allele(s) of one or more known loci that the individual has inherited from its parents. The term genotype can be used to refer to an individual's genetic constitution at a single locus, at multiple loci, or more generally, the term genotype can be used to refer to an individual's genetic make-up for all the genes in its genome. Genotypes can be indirectly characterized, e.g., using markers and/or directly characterized by nucleic acid sequencing.

[0104] As used herein, the term “germplasm” refers to genetic material of or from an individual (e.g., a plant), a group of individuals (e.g., a plant line, variety or family), or a clone derived from a line, variety, species, or culture. The germplasm can be part of an organism or cell or can be separate from the organism or cell. In general, germplasm provides genetic material with a specific molecular makeup that provides a physical foundation for some or all of the hereditary qualities of an organism or cell culture. As used herein, germplasm may refer to seeds, cells (including protoplasts and calli) or tissues from which new plants may be grown, as well as plant parts that can be cultured into a whole plant (e.g., stems, buds, roots, leaves, etc.).

[0105] As used herein, a “Heterologous DNA” sequence refers to a polynucleotide sequence that originates from a foreign source or species or, if from the same source, is modified from its original form.

[0106] As used herein, a “Homologous DNA” refers to DNA from the same source as that of the recipient cell.

[0107] As used herein, the term “hybrid” refers to a seed and/or plant produced when at least two genetically dissimilar parents are crossed.

[0108] As used herein, the term “inbred” refers to a substantially homozygous plant or variety. The term may refer to a plant or variety that is substantially homozygous throughout the entire genome or that is substantially homozygous with respect to a portion of the genome that is of particular interest.

[0109] As used herein, the term “indel” refers to an insertion or deletion in a pair of nucleotide sequences, wherein a first sequence may be referred to as having an insertion relative to a second sequence or the second sequence may be referred to as having a deletion relative to the first sequence.

[0110] As used herein, the terms “introgression,” “introgressing” and “introgressed” refer to both the natural and artificial transmission of a desired allele or combination of desired alleles of a genetic locus or genetic loci from one genetic background to another. For example, a desired allele at a specified locus can be transmitted to at least one progeny via a sexual cross between two parents of the same species, where at least one of the parents has the desired allele in its genome. Alternatively, for example, transmission of an allele can occur by recombination between two donor genomes, e.g., in a fused protoplast, where at least one of the donor protoplasts has the desired allele in its genome. The desired allele may be a selected allele of a marker, a QTL, a transgene, or the like. Offspring comprising the desired allele can be repeatedly backcrossed to a line having a desired genetic background and selected for the desired allele, with the result being that the desired allele becomes fixed in the desired genetic background. For example, an R-gene or marker associated with enhanced ASR tolerance or resistance may be introgressed from a donor into a recurrent parent that is not disease resistant. The resulting offspring could then be repeatedly backcrossed and selected until the progeny possess the ASR tolerance allele(s) in the recurrent parent background.

[0111] As used herein, an “isolated” nucleic acid molecule or gene is substantially separated away from other nucleic acid or gene sequences with which the nucleic acid is normally associated, such as, from the chromosomal or extrachromosomal DNA of a cell in which the nucleic acid or gene naturally occurs. A nucleic acid molecule is an isolated nucleic acid molecule when it comprises a transgene or part of a transgene present in the genome of another organism. The term also embraces nucleic acids that are biochemically purified to substantially remove contaminating nucleic acids and other cellular components.

[0112] A polypeptide is “isolated” if it has been separated from the cellular components (nucleic acids, lipids, carbohydrates, and other polypeptides) that naturally accompany it or that is chemically synthesized or recombinant. A polypeptide molecule is an isolated polypeptide molecule when it is expressed from a transgene in another organism. A monomeric polypeptide is isolated when at least 60% by weight of a sample is composed of the polypeptide, preferably 90% or more, more preferably 95% or more, and most preferably more than 99%. Protein purity or homogeneity is indicated, for example, by polyacrylamide gel electrophoresis of a protein sample, followed by visualization of a single polypeptide band upon staining the polyacrylamide gel; high pressure liquid chromatography; or other conventional methods. Proteins can be purified by any of the means known in the art, for example as described in Guide to Protein Purification, ed. Deutscher, Meth. Enzymol. 185, Academic Press, San Diego, 1990; and Scopes, Protein Purification: Principles and Practice, Springer Verlag, New York, 1982.

[0113] Using well-known methods, the skilled artisan can readily produce nucleotide and amino acid sequence variants of genes and proteins that provide a modified gene product. Chemical synthesis of nucleic acids can be performed, for example, on automated oligonucleotide synthesizers. Such variants preferably do not change the reading frame of the protein-coding region of the nucleic acid. The present invention also encompasses fragments of a protein that lacks at least one residue of a full-length protein, but that substantially maintains activity of the protein.

[0114] A “locus” is a position on a chromosome where a gene or marker or allele is located. In some embodiments, a locus may encompass one or more nucleotides.

[0115] A “non-naturally occurring variety of soybean” is any variety of soybean that does not naturally exist in nature. A “non-naturally occurring variety of soybean” may be produced by any method known in the art, including, but not limited to, transforming a soybean plant or germplasm, transfecting a soybean plant or germplasm and crossing a naturally occurring variety of soybean with a non-naturally occurring variety of soybean. In some embodiments, a “non-naturally occurring variety of soybean” may comprise one of more heterologous nucleotide sequences. In some embodiments, a “non-naturally occurring variety of soybean” may comprise one or more non-naturally occurring copies of a naturally occurring nucleotide sequence (i.e., extraneous copies of a gene that naturally occurs in soybean). In some embodiments, a “non-naturally occurring variety of soybean” may comprise a non-natural combination of two or more naturally occurring nucleotide sequences (i.e., two or more naturally occurring genes that do not naturally occur in the same soybean, for instance genes not found in Glycine max lines such as polynucleotides from wild glycine species).

[0116] As used herein, the terms “phenotype,” “phenotypic trait” or “trait” refer to one or more traits and/or manifestations of an organism. The phenotype can be a manifestation that is observable to the naked eye, or by any other means of evaluation known in the art, e.g., microscopy, biochemical analysis, or an electromechanical assay. In some cases, a phenotype or trait is directly controlled by a single gene or genetic locus, i.e., a “single gene trait.” In other cases, a phenotype or trait is the result of several genes. It is noted that, as used herein, the term “pathogen resistant phenotype” or “disease resistant phenotype” takes into account environmental conditions that might affect the respective pathogen or disease such that the effect is real and reproducible.

[0117] As used herein, the term “plant” may refer to a whole plant, any part thereof, or a cell or tissue culture derived from a plant. Thus, the term “plant” can refer to any of: whole plants, plant components or organs (e.g., roots, stems, leaves, buds, flowers, pods, etc.), plant tissues, seeds and/or plant cells. A plant cell is a cell of a plant, taken from a plant, or derived through culture from a cell taken from a plant. Thus, the term “soybean plant” may refer to a whole soybean plant, one or more parts of a soybean plant (e.g., roots, root tips, stems, leaves, buds, flowers, pods, seeds, cotyledons, etc.), soybean plant cells, soybean plant protoplasts and/or soybean plant calli.

[0118] A “plant cell” is a structural and physiological unit of a plant, comprising a protoplast and a cell wall. The plant cell may be in the form of an isolated single cell or a cultured cell, or as a part of a higher organized unit such as, for example, plant tissue, a plant organ, or a whole plant. In embodiments, the plant cell is non-propagating and/or cannot regenerate a whole plant.

[0119] A “plant cell culture” means a culture of plant units such as, for example, protoplasts, cell culture cells, cells in plant tissues, pollen, pollen tubes, ovules, embryo sacs, zygotes and embryos at various stages of development.

[0120] “Plant material” refers to leaves, stems, roots, flowers or flower parts, fruits, pollen, egg cells, zygotes, seeds, cuttings, cell or tissue cultures, or any other part or product of a plant.

[0121] A “plant organ” is a distinct and visibly structured and differentiated part of a plant such as a root, stem, leaf, flower bud, or embryo.

[0122] As used herein, the term “plant part” includes but is not limited to embryos, pollen, ovules, seeds, leaves, flowers, branches, fruit, stalks, roots, root tips, anthers, and/or plant cells including plant cells that are intact in plants and/or parts of plants, plant protoplasts, plant tissues, plant cell tissue cultures, plant calli, plant clumps, and the like.

[0123] “Plant tissue” as used herein means a group of plant cells organized into a structural and functional unit. Any tissue of a plant in planta or in culture is included. This term includes, but is not limited to, whole plants, plant organs, plant seeds, tissue culture and any groups of plant cells organized into structural or functional units. The use of this term in conjunction with, or in the absence of, any specific type of plant tissue as listed above or otherwise embraced by this definition is not intended to be exclusive of any other type of plant tissue.

[0124] “Polyadenylation signal” or “polyA signal” refers to a nucleic acid sequence located 3′ to a coding region that causes the addition of adenylate nucleotides to the 3′ end of the mRNA transcribed from the coding region.

[0125] “Polymerase chain reaction (PCR)” refers to a DNA amplification method that uses an enzymatic technique to create multiple copies of one sequence of nucleic acid (amplicon). Copies of a DNA molecule are prepared by shuttling a DNA polymerase between two amplimers. The basis of this amplification method is multiple cycles of temperature changes to denature, then re-anneal amplimers (DNA primer molecules), followed by extension to synthesize new DNA strands in the region located between the flanking amplimers. Nucleic-acid amplification can be accomplished by any of the various nucleic-acid amplification methods known in the art, including the polymerase chain reaction (PCR). A variety of amplification methods are known in the art and are described, inter alia, in U.S. Pat. Nos. 4,683,195 and 4,683,202 and in PCR Protocols: A Guide to Methods and Applications, ed. Innis et al., Academic Press, San Diego, 1990. PCR amplification methods have been developed to amplify up to 22 kb of genomic DNA and up to 42 kb of bacteriophage DNA (Cheng et al., Proc. Natl. Acad. Sci. USA 91:5695-5699, 1994). These methods as well as other methods known in the art of DNA amplification may be used in the practice of the present invention.

[0126] As used herein, the term “primer” refers to an oligonucleotide which is capable of annealing to a nucleic acid target and serving as a point of initiation of DNA synthesis when placed under conditions in which synthesis of a primer extension product is induced (e.g., in the presence of nucleotides and an agent for polymerization such as DNA polymerase and at a suitable temperature and pH). A primer (in some embodiments an extension primer and in some embodiments an amplification primer) is in some embodiments single stranded for maximum efficiency in extension and/or amplification. In some embodiments, the primer is an oligodeoxyribonucleotide. A primer is typically sufficiently long to prime the synthesis of extension and/or amplification products in the presence of the agent for polymerization. The minimum length of the primer can depend on many factors, including, but not limited to temperature and composition (A/T vs. G/C content) of the primer. In the context of amplification primers, these are typically provided as a pair of bi-directional primers consisting of one forward and one reverse primer or provided as a pair of forward primers as commonly used in the art of DNA amplification such as in PCR amplification. As such, it will be understood that the term “primer,” as used herein, can refer to more than one primer, particularly in the case where there is some ambiguity in the information regarding the terminal sequence(s) of the target region to be amplified. Hence, a “primer” can include a collection of primer oligonucleotides containing sequences representing the possible variations in the sequence or includes nucleotides which allow a typical base pairing. Primers can be prepared by any suitable method known in the art. Methods for preparing oligonucleotides of specific sequence are known in the art, and include, for example, cloning and restriction of appropriate sequences and direct chemical synthesis. Chemical synthesis methods can include, for example, the phospho di- or tri-ester method, the diethylphosphoramidate method and the solid support method disclosed in U.S. Pat. No. 4,458,066. Primers can be labeled, if desired, by incorporating detectable moieties by for instance spectroscopic, fluorescence, photochemical, biochemical, immunochemical, or chemical moieties. Primers diagnostic (i.e. able to identify or select based on presence of ASR resistant alleles) for ASR resistance can be created to any favorable SNP as described in any one of Tables 1-5. The PCR method is well described in handbooks and known to the skilled person. After amplification by PCR, target polynucleotides can be detected by hybridization with a probe polynucleotide, which forms a stable hybrid with the target sequence under stringent to moderately stringent hybridization and wash conditions. If it is expected that the probes are essentially completely complementary (i.e., about 99% or greater) to the target sequence, stringent conditions can be used. If some mismatching is expected, for example if variant strains are expected with the result that the probe will not be completely complementary, the stringency of hybridization can be reduced. In some embodiments, conditions are chosen to rule out non-specific/adventitious binding. Conditions that affect hybridization, and that select against non-specific binding are known in the art, and are described in, for example, Sambrook & Russell (2001). Molecular Cloning: A Laboratory Manual, Third Edition, Cold Spring Harbor Laboratory Press, Cold Spring Harbor, New York, United States of America. Generally, lower salt concentration and higher temperature hybridization and/or washes increase the stringency of hybridization conditions.

[0127] As used herein, the terms “progeny” and “progeny plant” refer to a plant generated from a vegetative or sexual reproduction from one or more parent plants. A progeny plant may be obtained by cloning or selfing a single parent plant, or by crossing two parental plants.

[0128] As used herein, “protein” refers to a polynucleotide, usually upstream (5′) of its coding polynucleotide, which controls the expression of the coding polynucleotide by providing the recognition for RNA polymerase and other factors required for proper transcription. In example embodiments of the present invention, proteins or polynucleotides are provided that when expressed in a plant or plant cell, confer the plant with enhanced resistance to a plant pathogen.

[0129] The term “promoter” or “promoter region” refers to a polynucleic acid molecule that functions as a regulatory element, usually found upstream (5′) to a coding sequence, that controls expression of the coding sequence by controlling production of messenger RNA (mRNA) by providing the recognition site for RNA polymerase and/or other factors necessary for start of transcription at the correct site. As contemplated herein, a promoter or promoter region includes variations of promoters derived by means of ligation to various regulatory sequences, random or controlled mutagenesis, and addition or duplication of enhancer sequences. The promoter region disclosed herein, and biologically functional equivalents thereof, are responsible for driving the transcription of coding sequences under their control when introduced into a host as part of a suitable recombinant DNA construct, as demonstrated by its ability to produce mRNA. In some embodiments, such as in the vector constructs and expression cassettes disclosed herein, the promoter may be heterologous to the coding sequence whose expression the promoter controls, such as when the promoter and the coding sequence are derived from different sources, such as different organisms (e.g., in embodiments, the vectors described herein comprise an R-gene sequence derived from Glycine tomentella and a promoter sequence derived from Medicago trunculata). In other examples, the promoter may be endogenous or native to the coding sequence whose expression the promoter controls, such as when the promoter and the coding sequence are derived from a common source, such as a common organism. A number of promoters can be used in an expression cassette, including a combination of the native promoter of an R gene encoding an R protein and one or more heterologous promoters.

[0130] Alternatively, promoters can be selected based upon a desired outcome. Such promoters include, but are not limited to, “constitutive promoters” (where expression of a polynucleotide sequence operably linked to the promoter is unregulated and therefore continuous), “inducible promoters” (where expression of a polynucleotide sequence operably linked to the promoter is induced by an analyte, cofactor, regulatory protein, etc.), “repressible promoters” (where expression of a polynucleotide sequence operably linked to the promoter is repressed by an analyte, cofactor, regulatory protein, etc.), and “tissue-preferred promoters” (where expression of a polynucleotide sequence operably linked to the promoter is higher in a preferred tissue relative to other tissues, such as higher in leaf tissue relative to other plant tissues).

[0131] As used herein, “plant promoter” means a promoter that drives expression in a plant such as a constitutive, inducible (e.g., chemical-, environmental-, pathogen- or wound-inducible), repressible, tissue-preferred or other promoter for use in plants.

[0132] Example promoters are set forth in WO 99/43838 and in U.S. Pat. Nos. 8,575,425; 7,790,846; 8,147,856; 8,586832; 7,772,369; 7,534,939; 6,072,050; 5,659,026; 5,608,149; 5,608,144; 5,604,121; 5,569,597; 5,466,785; 5,399,680; 5,268,463; 5,608,142; and 6,177,611; herein incorporated by reference. Example constitutive promoters include CaMV 35S promoter (Odell et al. (985) Nature 313:810-812); rice actin (McElroy et al. (1990) Plant Cell 2: 163-171); ubiquitin (Christensen et al. (1989) Plant Mol. Biol. 12:619-632 and Christensen et al. (1992) Plant Mol. Biol. 18:675-689); pEMU (Last et al. (1991) Theor. Appl. Genet. 81: 581-588); MAS (Velten e/a/. (1984) EMBO J. 3:2723-2730). Example inducible promoters include those that drive expression of pathogenesis-related proteins (PR proteins), which are induced following infection by a pathogen. See, for example, Redolfi et al. (1983) Neth. J. Plant Pathol. 89:245-254; Uknes et al. (1992) Plant Cell 4:645-656; and Van Loon (1985) Plant Mol. Virol. 4: 111-116; and WO 99/43819, herein incorporated by reference. Promoters that are expressed locally at or near the site of pathogen infection may also be used (Marineau et al. (1987) Plant Mol. Biol. 9:335-342; Matton et al. (1989) Molecular Plant-Microbe Interactions 2: 325-331; Somsisch et al. (1986) Proc. Natl. Acad. Sci. USA 83:2427-2430; Somsisch et al. (1988) Mol. Gen. Genet. 2:93-98; and Yang (1996) Proc. Natl. Acad. Sci. USA 93: 14972-14977; Chen et al. (1996) Plant J. 10:955-966; Zhang et al. (1994) Proc. Natl. Acad. Sci. USA 91:2507-2511; Warner et al. (1993) Plant J. 3: 191-201; Siebertz et al. (1989) Plant Cell 1:961-968; Cordero et al. (1992) Physiol. Mol. Plant Path. 41: 189-200; U.S. Pat. No. 5,750,386 (nematode-inducible); and the references cited therein).

[0133] Wound-inducible promoters include pin II promoter (Ryan (1990) Ann. Rev. Phytopath. 28:425-449; Ouan et al. (1996) Nature Biotechnology 14:494-498); wun1 and wun2 (U.S. Pat. No. 5,428,148); win1 and win2 (Stanford et al. (1989) Mol. Gen. Genet. 215:200-208); systemin (McGurl et al. (1992) Science 225: 1570-1573); WIP1 (Rohmeier et al. (1993) Plant Mol. Biol. 22:783-792; Eckelkamp et al. (1993) FEBS Letters 323:73-76); MPI gene (Corderok et al. (1994) Plant J. 6(2): 141-150); and the like, herein incorporated by reference.

[0134] Tissue-preferred promoters for use in the invention include those set forth in Yamamoto et al. (1997) Plant J. 12(2):255-265; Kawamata et al. (1997) Plant Cell Physiol. 38(7):792-803; Hansen et al. (1997) Mol. Gen Genet. 254(3):337-343; Russell et al. (1997) Transgenic Res. 6(2): 157-168; Rinehart et al. (1996) Plant Physiol. 112(3): 1331-1341; Van Camp et al. (1996) Plant Physiol. 112(2):525-535; Canevascim et al. (1996) Plant Physiol. 112(2):513-524; Yamamoto et al. (1994) Plant Cell Physiol. 35(5):773-778; Lam (1994) Results Probl. Cell Differ. 20: 181-196; Orozco et al. (1993) PlantMolBiol. 23(6): 1129-1138; Matsuoka et al. (1993) Proc Natl. Acad. Sci. USA 90(20):9586-9590; and Guevara-Garcia et al. (1993) Plant J. 4(3):495-505.

[0135] Leaf-preferred promoters include those set forth in Yamamoto et al. (1997) Plant J. 12(2):255-265; Kwon et al. (1994) Plant Physiol. 105:357-67; Yamamoto et al. (1994) Plant Cell Physiol. 35(5):773-778; Gotor et al. (1993) Plant J. 3:509-18; Orozco et al. (1993) Plant Mol. Biol. 23(6): 1129-1138; and Matsuoka et al. (1993) Proc. Natl. Acad. Sci. USA 90(20):9586-9590.

[0136] Root-preferred promoters are known and include those in Hire et al. (1992) Plant Mol. Biol. 20(2):207-218 (soybean root-specific glutamine synthetase gene); Keller and Baumgartner (1991) Plant Cell 3(10): 1051-1061 (root-specific control element); Sanger et al. (1990) Plant Mol. Biol. 14(3):433-443 (mannopine synthase (MAS) gene of Agrobacterium tumefaciens); and Miao et al. (1991) Plant Cell 3(1): 11-22 (cytosolic glutamine synthetase (GS)); Bogusz et al. (1990) Plant Cell 2(7):633-641; Leach and Aoyagi (1991) Plant Science (Limerick) 79(1):69-76 (rolC and rolD); Teeri et al. (1989) EMBO J. 8(2):343-350; Kuster et al. (1995) Plant Mol. Biol. 29(4):759-772 (the VfENOD-GRP3 gene promoter); and, Capana et al. (1994) Plant Mol. Biol. 25(4):681-691 (rolB promoter). See also U.S. Pat. Nos. 5,837,876; 5,750,386; 5,633,363; 5,459,252; 5,401,836; 5,110,732; and 5,023,179.

[0137] As used herein, “recombinant” refers to a form of nucleic acid (e.g., DNA or RNA) and/or protein and/or an organism that would not normally be found in nature and as such was created by human intervention. Such human intervention may produce a recombinant nucleic acid molecule and/or a recombinant plant. As used herein, a “recombinant DNA molecule” is a DNA molecule comprising a combination of DNA molecules that would not naturally occur together and is the result of human intervention, e.g., a DNA molecule that is comprised of a combination of at least two DNA molecules heterologous to each other, and/or a DNA molecule that is artificially synthesized and comprises a polynucleotide that deviates from the polynucleotide that would normally exist in nature, and/or a DNA molecule that is artificially incorporated into a host cell's genomic DNA and the associated flanking DNA of the host cell's genome. An example of a recombinant DNA molecule is a DNA molecule resulting from the insertion of the transgene or a genome modification (i.e., a gene edit) into a plant's genomic DNA, which may ultimately result in the expression of a recombinant RNA and/or protein molecule in that organism. As used herein, a “recombinant plant” is a plant that would not normally exist in nature, is the result of human intervention, and contains a transgene and/or heterologous DNA molecule and/or a genome modification (i.e., a gene edit) incorporated into its genome. As a result of such genomic alteration, the recombinant plant is distinctly different from the related wildtype plant. The term “recombinant DNA construct” refers to any agent such as a plasmid, cosmid, virus, autonomously replicating sequence, phage, or linear or circular single-stranded or double-stranded DNA or RNA nucleotide sequence, derived from any source, capable of genomic integration or autonomous replication, comprising a DNA molecule that one or more DNA sequences have been linked in a functionally operative manner. Recombinant DNA constructs may be constructed to be capable of expressing antisense RNAs or stabilized double stranded antisense RNAs.

[0138] The phrase “substantially identical,” in the context of two nucleic acids or two amino acid sequences, refers to two or more sequences or subsequences that have at least about 50% nucleotide or amino acid residue identity when compared and aligned for maximum correspondence as measured using a sequence comparison algorithm or by visual inspection. In certain embodiments, substantially identical sequences have at least about 60%, 65%, 70%, 75%, 80%, 81%, 82%, 83%, 84%, 85%, 86%, 87%, 88%, 89%, 90%, 91%, 92%, 93%, 94%, 95%, 96%, 97%, 98%, 99% or more nucleotide or amino acid residue identity. In certain embodiments, substantial identity exists over a region of the sequences that is at least about 50 amino acid residues, 100 amino acid residues, 150 amino acid residues, 200 amino acid residues, 250 amino acid residues, 300 amino acid residues, 350 amino acid residues, 400 amino acid residues, 450 amino acid residues, 500 amino acid residues, 525 amino acid residues, 526, amino acid residues 527 amino acid residues, 528 amino acid residues, 529 amino acid residues, 530 amino acid residues, 531 amino acid residues, 532 amino acid residues, 533 amino acid residues, 534 amino acid residues, 535 amino acid residues, 536 amino acid residues or more with respect to the protein sequence or the nucleotide sequence encoding the same. In further embodiments, the sequences are substantially identical when they are identical over the entire length of the coding regions.

[0139] The term “identity”, “sequence identity”, “homology”, “similarity”. “sequence similarity” or “identical” in the context of two nucleic acid or amino acid sequences, refers to the percentage of identical nucleotides or amino acids in a linear polynucleotide or amino acid sequence of a reference (“query”) sequence (or its complementary strand) as compared to a test (“subject”) sequence when the two sequences are globally aligned. Unless otherwise stated, sequence identity as used herein refers to the value obtained using the Needleman and Wunsch algorithm ((1970) J. Mol. Biol. 48:443-453) implemented in the EMBOSS Needle alignment tool using default matrix files EBLOSUM62 for protein with default parameters (Gap Open=10, Gap Extend=0.5, End Gap Penalty=False, End Gap Open=10, End Gap Extend=0.5) or DNAfull for nucleic acids with default parameters (Gap Open=10, Gap Extend=0.5, End Gap Penalty=False, End Gap Open=10, End Gap Extend=0.5); or any equivalent program thereof. EMBOSS Needle is available, e.g., from EMBL-EBI such as at the following website: ebi.ac.uk/Tools/psa/emboss_needle/ and as described in the following publication: “The EMBL-EBI search and sequence analysis tools APIs in 2019.” Madeira et al. Nucleic Acids Research, June 2019, 47(W1):W636-W641. The term “equivalent program” as used herein refers to any sequence comparison program that, for any two sequences in question, generates an alignment having identical nucleotide or amino acid residue matches and an identical percent sequence identity when compared to the corresponding alignment generated by EMBOSS Needle. In a preferred embodiment, substantially identical nucleic acid or amino acid sequences may perform substantially the same function. In embodiments, sequences that are substantially identical have at least 60%, at least 70%, at least 80%, at least 85%, at least 90%, or at least 95% sequence identity to each other.

[0140] The terms “homology”, “sequence similarity”, or “sequence identity” in reference to nucleotide or amino acid sequences mean a degree of identity or similarity of two or more sequences and may be determined conventionally by using known software or computer programs such as the Best-Fit or Gap pairwise comparison programs (GCG Wisconsin Package, Genetics Computer Group, 575 Science Drive, Madison, Wis. 53711). BestFit uses the local homology algorithm of Smith and Waterman, Advances in Applied Mathematics 2:482-489 (1981), to find the best segment of identity or similarity between two sequences. Sequence comparison between two or more polynucleotides or polypeptides is generally performed by comparing portions of the two sequences over a comparison window to identify and compare local regions of sequence similarity. The comparison window is generally from about 20 to 200 contiguous nucleotides. Gap performs global alignments: all of one sequence with all of another similar sequence using the method of Needleman and Wunsch, J. Mol. Biol. 48:443-453 (1970). When using a sequence alignment program such as BestFit to determine the degree of DNA sequence homology, similarity or identity, the default setting may be used, or an appropriate scoring matrix may be selected to optimize identity, similarity or homology scores. Similarly, when using a program such as BestFit to determine sequence identity, similarity or homology between two different amino acid sequences, the default settings may be used, or an appropriate scoring matrix, such as blosum45 or blosum80, may be selected to optimize identity, similarity or homology scores.

[0141] Two nucleotide sequences can also be considered to be substantially identical when the two sequences hybridize to each other under stringent conditions. In representative embodiments, two nucleotide sequences considered to be substantially identical hybridize to each other under highly stringent conditions.

[0142] The terms “stringent conditions” or “stringent hybridization conditions” include reference to conditions under which a nucleic acid will selectively hybridize to a target sequence to a detectably greater degree than other sequences (e.g., at least 2-fold over a non-target sequence), and optionally may substantially exclude binding to non-target sequences. Stringent conditions are sequence-dependent and will vary under different circumstances. By controlling the stringency of the hybridization and/or washing conditions, target sequences can be identified that can be up to 100% complementary to the reference nucleotide sequence. Alternatively, conditions of moderate or even low stringency can be used to allow some mismatching in sequences so that lower degrees of sequence similarity are detected. For example, those skilled in the art will appreciate that to function as a primer or probe, a nucleic acid sequence only needs to be sufficiently complementary to the target sequence to substantially bind thereto so as to form a stable double-stranded structure under the conditions employed. Thus, primers or probes can be used under conditions of high, moderate or even low stringency. Likewise, conditions of low or moderate stringency can be advantageous to detect homolog, ortholog and/or paralog sequences having lower degrees of sequence identity than would be identified under highly stringent conditions.

[0143] The terms “complementary” or “complementarity” (and similar terms), as used herein, refer to the natural binding of polynucleotides under permissive salt and temperature conditions by base-pairing. For example, the sequence “A-G-T” binds to the complementary sequence “T-C-A.” Complementarity between two single-stranded molecules may be partial, in which only some of the nucleotides bind, or it may be complete when total complementarity exists between the single stranded molecules. The degree of complementarity between nucleic acid strands has significant effects on the efficiency and strength of hybridization between the molecules. As used herein, the term “substantially complementary” (and similar terms) means that two nucleic acid sequences are at least about 50%, 60%, 70%, 75%, 80%, 85%, 90%, 95%, 96%, 97%, 98%, 99% or more complementary. Alternatively, the term “substantially complementary” (and similar terms) can mean that two nucleic acid sequences can hybridize together under high stringency conditions (as described herein).

[0144] As used herein, “specifically” or “selectively” hybridizing (and similar terms) refers to the binding, duplexing, or hybridizing of a molecule to a particular nucleic acid target sequence under stringent conditions when that sequence is present in a complex mixture (e.g., total cellular DNA or RNA) to the substantial exclusion of non-target nucleic acids, or even with no detectable binding, duplexing or hybridizing to non-target sequences. Specifically or selectively hybridizing sequences typically are at least about 40% complementary and are optionally substantially complementary or even completely complementary (i.e., 100% identical).

[0145] For DNA-DNA hybrids, the Tₘ can be approximated from the equation of Meinkoth and Wahl, Anal. Biochem., 138:267-84 (1984): Tₘ=81.5° C.+16.6 (log M)+0.41 (% GC)−0.61 (% formamide)−500/L; where M is the molarity of monovalent cations, % GC is the percentage of guanosine and cytosine nucleotides in the DNA, % formamide is the percentage of formamide in the hybridization solution, and L is the length of the hybrid in base pairs. The Tₘ is the temperature (under defined ionic strength and pH) at which 50% of a complementary target sequence hybridizes to a perfectly matched probe. Tₘ is reduced by about 1° C. for each 1% of mismatching; thus, Tₘ, hybridization and/or wash conditions can be adjusted to hybridize to sequences of the desired degree of identity. For example, if sequences with >90% identity are sought, the Tₘ can be decreased 10° C. Generally, stringent conditions are selected to be about 5° C. lower than the thermal melting point (Tₘ) for the specific sequence and its complement at a defined ionic strength and pH. However, highly stringent conditions can utilize a hybridization and/or wash at the thermal melting point (Tₘ) or 1, 2, 3 or 4° C. lower than the thermal melting point (Tₘ); moderately stringent conditions can utilize a hybridization and/or wash at 6, 7, 8, 9 or 10° C. lower than the thermal melting point (Tₘ); low stringency conditions can utilize a hybridization and/or wash at 11, 12, 13, 14, 15 or 20° C. lower than the thermal melting point (Tₘ). If the desired degree of mismatching results in a Tₘ of less than 45° C. (aqueous solution) or 32° C. (formamide solution), optionally the SSC concentration can be increased so that a higher temperature can be used. An extensive guide to the hybridization of nucleic acids is found in Tijssen, Laboratory Techniques in Biochemistry and Molecular Biology-Hybridization with Nucleic Acid Probes, part I, chapter 2, “Overview of principles of hybridization and the strategy of nucleic acid probe assays,” Elsevier, New York (1993); Current Protocols in Molecular Biology, chapter 2, Ausubel, et al., eds, Greene Publishing and Wiley-Interscience, New York (1995); and Green & Sambrook, In: Molecular Cloning, A Laboratory Manual, 4th Edition, Cold Spring Harbor Press, Cold Spring Harbor, N.Y. (2012).

[0146] Typically, stringent conditions are those in which the salt concentration is less than about 1.5 M Na ion, typically about 0.01 to 1.0 M Na ion concentration (or other salts) at about pH 7.0 to pH 8.3 and the temperature is at least about 30° C. for short probes (e.g., 10 to 50 nucleotides) and at least about 60° C. for longer probes (e.g., greater than 50 nucleotides). Stringent conditions may also be achieved with the addition of destabilizing agents such as formamide or Denhardt's (5 g Ficoll, 5 g polyvinylpyrrolidone, 5 g bovine serum albumin in 500 ml of water). Exemplary low stringency conditions include hybridization with a buffer solution of 30% to 35% formamide, 1 M NaCl, 1% SDS (sodium dodecyl sulfate) at 37° C. and a wash in 1× to 2×SSC (20×SSC=3.0 M NaCl/0.3 M trisodium citrate) at 50° C. to 55° C. Exemplary moderate stringency conditions include hybridization in 40% to 45% formamide, 1 M NaCl, 1% SDS at 37° C. and a wash in 0.5× to 1×SSC at 55° C. to 60° C. Exemplary high stringency conditions include hybridization in 50% formamide, 1 M NaCl, 1% SDS at 37° C. and a wash in 0.1×SSC at 60° C. to 65° C. A further non-limiting example of high stringency conditions include hybridization in 4×SSC, 5×Denhardt's, 0.1 mg/ml boiled salmon sperm DNA, and 25 mM Na phosphate at 65° C. and a wash in 0.1×SSC, 0.1% SDS at 65° C. Another illustration of high stringency hybridization conditions includes hybridization in 7% SDS, 0.5 M NaPO₄, 1 mM EDTA at 50° C. with washing in 2×SSC, 0.1% SDS at 50° C., alternatively with washing in 1×SSC, 0.1% SDS at 50° C., alternatively with washing in 0.5×SSC, 0.1% SDS at 50° C., or alternatively with washing in 0.1×SSC, 0.1% SDS at 50° C., or even with washing in 0.1×SSC, 0.1% SDS at 65° C. Those skilled in the art will appreciate that specificity is typically a function of post-hybridization washes, the relevant factors being the ionic strength and temperature of the final wash solution.

[0147] Nucleic acids that do not hybridize to each other under stringent conditions are still substantially identical if the proteins that they encode are substantially identical (e.g., due to the degeneracy of the genetic code).

[0148] A further indication that two nucleic acids or proteins are substantially identical is that the protein encoded by the first nucleic acid is immunologically cross reactive with the protein encoded by the second nucleic acid. Thus, a protein is typically substantially identical to a second protein, for example, where the two proteins differ only by conservative substitutions.

[0149] The term “vector” refers to a composition for transferring, delivering or introducing a nucleic acid (or nucleic acids) into a cell. A vector comprises a nucleic acid molecule comprising the nucleotide sequence(s) to be transferred, delivered or introduced.

[0150] Provided herein are plants expressing polypeptides that increase the plant's ability for pathogen resistance as compared to a control plant that does not express the polypeptide. The polypeptide includes SEQ ID NO: 5 and functional fragments and variants thereof. Various means of introducing nucleic acid sequence into the soybean plant are also disclosed, which include transgenic means, gene editing, and breeding. Markers for identifying the presence of these nucleic acid sequences in the plant are also disclosed.

[0151] In some embodiments, the plants provided herein are a non-naturally occurring variety of soybean having the desired trait. In specific embodiments, the non-naturally occurring variety of soybean is an elite soybean variety. A “non-naturally occurring variety of soybean” is any variety of soybean that does not naturally exist in nature. A “non-naturally occurring variety of soybean” may be produced by any method known in the art, including, but not limited to, transforming a soybean plant or germplasm, transfecting a soybean plant or germplasm and crossing a naturally occurring variety of soybean with a non-naturally occurring variety of soybean. In some embodiments, a “non-naturally occurring variety of soybean” may comprise one of more heterologous nucleotide sequences. In some embodiments, a “non-naturally occurring variety of soybean” may comprise one or more non-naturally occurring copies of a naturally occurring nucleotide sequence (i.e., extraneous copies of a gene that naturally occurs in soybean). In some embodiments, a “non-naturally occurring variety of soybean” may comprise a non-natural combination of two or more naturally occurring nucleotide sequences (i.e., two or more naturally occurring genes that do not naturally occur in the same soybean, for instance genes not found in Glycine max lines).

[0152] Methods and compositions are provided that increase the pathogen resistance capability in a plant, a plant part, or a seed. In specific embodiments, various methods and compositions are provided that produce an increase in resistance to Asian Soy Rust in the plant, plant part or seed. An increase in pathogen resistance includes any statistically significant increase in plant's ability to resist infection by the pathogen when compared to an appropriate control plant or plant part.

[0153] A “subject plant or plant cell” is one in which genetic alteration, such as transformation, has been affected as to a polynucleotide of interest, or is a plant or plant cell which is descended from a plant or cell so altered and which comprises the alteration. A “control” or “control plant” or “control plant cell” provides a reference point for measuring changes in phenotype of the subject plant or plant cell. A control plant or plant cell may comprise, for example: (a) a wild-type plant or cell, i.e., of the same genotype as the starting material for the genetic alteration which resulted in the subject plant or cell; (b) a plant or plant cell of the same genotype as the starting material but which has been transformed with a null construct (i.e., with a construct which has no known effect on the trait of interest, such as a construct comprising a marker gene); (c) a plant or plant cell which is a non-transformed segregant among progeny of a subject plant or plant cell; (d) a plant or plant cell genetically identical to the subject plant or plant cell but which is not exposed to conditions or stimuli that would induce expression of the gene of interest; or (e) the subject plant or plant cell itself, under conditions in which the gene of interest is not expressed.

[0154] Expression of Polynucleotides and Polypeptides that Confer Increased Pathogen Resistance

[0155] Compositions and methods for conferring increased pathogen resistance are provided. Polypeptides, polynucleotides and functional fragments and variants thereof that confer increased pathogen resistance are provided. In some embodiments, the polypeptide is SEQ ID NO: 5 or a fragment or variant of SEQ ID NO: 5. In some embodiments, the polynucleotide is any one of SEQ ID NOS: 1, 2-4, 11 and 12 or a polynucleotide encoding a polypeptide having the sequence of SEQ ID NO: 5, or a fragment or variant of any one thereof. In various embodiments, the polypeptide and polynucleotides or variant and fragments thereof confer increased resistance to Asian Soy Rust.

[0156] Fragments of the polypeptides that increase pathogen resistance when expressed in a plant, plant part, or seed include those that are shorter than the full-length sequences, either due to the use of an alternate downstream start site, or due to processing that produces a shorter protein having the activity. Such biologically active portions can be prepared by recombinant techniques and evaluated for activity of being able to confer increased pathogen resistance.

[0157] Variants disclosed herein include polypeptides having an amino acid sequence that has at least 60%, about 65%, about 70%, about 75%, about 80%, about 85%, about 86%, about 87%, about 88%, about 89%, about 90%, about 91%, about 92%, about 93%, about 94%, about 95%, about 96%, about 97%, about 98% or about 99% identity to the amino acid sequence of SEQ ID NO: 5. Similarly, variants disclosed herein include polynucleotides having a nucleotide sequence that has at least 60%, about 65%, about 70%, about 75%, about 80%, about 85%, about 86%, about 87%, about 88%, about 89%, about 90%, about 91%, about 92%, about 93%, about 94%, about 95%, about 96%, about 97%, about 98% or about 99% identity to the nucleotide sequence of any of SEQ ID NOS: 1, 2-4 and 11-12. Such variants will increase pathogen resistance when expressed in a plant, plant part or seed. In some embodiments, a variant polynucleotide/polypeptide comprises a deletion and/or addition of one or more nucleotides/amino acids at one or more internal sites within the native polynucleotide/polypeptide and/or a substitution of one or more nucleotides/amino acids at one or more sites in the native polynucleotide/polypeptide.

[0158] In some embodiments, the polypeptides disclosed herein may comprise a heterologous amino acid sequence attached thereto. For example, a polypeptide may have a polypeptide tag or additional protein domain attached thereto. The heterologous amino acid sequence can be attached to the N terminus, the C terminus, or internally within the polypeptide. In some instances, the polypeptide may have one or more polypeptide tags and/or additional protein domains attached thereto at one or more positions of the polypeptide.

[0159] In some embodiments, the nucleic acid sequence encoding the polypeptides disclosed herein may comprise a heterologous nucleic acid sequence attached thereto. For example, the heterologous nucleic acid sequence may encode a polypeptide tag or additional protein domain that will be attached to the encoded polypeptide. As another example, the heterologous nucleic acid sequence may encode a regulatory element such as an intron, an enhancer, a promoter, a terminator, etc. The heterologous nucleic acid sequence can be positioned at the 5′ end, the 3′ end, or in-frame within the coding sequence of the polypeptide. In some instances, the nucleic acid sequence encoding the polypeptides disclosed herein may have one or more heterologous nucleic acid sequences attached thereto at one or more positions of the nucleic acid sequence. In still other embodiments, nucleotide sequences disclosed herein further comprise one or more native regulatory elements, including, for example, the native promoter sequence, the native 5′UTR, the native 3′UTR and/or the native terminator, or any combination thereof.

[0160] Polynucleotides encoding the polypeptides provided herein can be provided in expression cassettes (herein also referred to as “DNA constructs”) for expression in an organism of interest. The cassette will include 5′ and 3′ regulatory sequences operably linked to a polynucleotide encoding a polypeptide provided herein that allows for expression of the polynucleotide comprising an R-gene in plants, thereby imparting pathogen resistance to the plants in which they are expressed. The cassette may additionally contain at least one additional gene or genetic element to be co-transformed into the organism. Where additional genes or elements are included, the components are operably linked. Alternatively, the additional gene(s) or element(s) can be provided on multiple expression cassettes. Such an expression cassette is provided with a plurality of restriction sites and/or recombination sites for insertion of the polynucleotides to be under the transcriptional regulation of the regulatory elements or regions. The expression cassette may additionally contain a selectable marker gene.

[0161] “DNA construct” refers to the genetic elements operably linked to each other making up a recombinant DNA molecule and may comprise elements that provide expression of a DNA polynucleotide molecule in a host cell and elements that provide maintenance of the construct in the host cell. The various genetic elements within the DNA construct can be native to polynucleotide encoding the polypeptide or heterologous to the native polynucleotide encoding the polypeptide. A plant expression cassette comprises the operable linkage of genetic elements that when transferred into a plant cell provides expression of a desirable gene product. “Plant expression cassette” refers to chimeric DNA segments comprising the regulatory elements that are operably linked to provide the expression of a transgene product in plants. Promoters, leaders, introns, transit peptide encoding polynucleic acids, 3′ transcriptional termination regions are all genetic elements that may be operably linked by those skilled in the art of plant molecular biology to provide a desirable level of expression or functionality to an R-gene of the present invention. A DNA construct can contain one or more plant expression cassettes expressing the DNA molecules of the present invention or other DNA molecules useful in the genetic engineering of crop plants. One example of a DNA construct that may be used for expressing the R-gene of the present invention is a vector with a nucleic acid sequence comprising the R-gene operably linked to one or more heterologous regulatory elements (e.g., a heterologous promoter and/or intron) or native regulatory elements (e.g., native promoter, introns, or terminator regions).

[0162] The expression cassette will include in the 5′-3′ direction of transcription, a transcriptional and translational initiation region (i.e., a promoter), a polynucleotide of the invention, and a transcriptional and translational termination region (i.e., termination region) functional in the organism of interest, i.e., a plant or bacteria. The promoters of the invention are capable of directing or driving transcription and expression of a coding sequence in a host cell. The regulatory regions (i.e., promoters, transcriptional regulatory regions, and translational termination regions) may be endogenous or heterologous to the host cell or to each other. As used herein, a chimeric gene or a chimeric nucleic acid molecule comprises a coding sequence operably linked to a transcription initiation region that is heterologous to the coding sequence.

[0163] A variety of transcriptional terminators are available for use in expression cassettes. These are responsible for the termination of transcription beyond the transgene and correct mRNA polyadenylation. The termination region may be native with the transcriptional initiation region, may be native with the operably linked DNA sequence of interest, may be native with the plant host, or may be derived from another source (i.e., foreign or heterologous to the promoter, the DNA sequence of interest, the plant host, or any combination thereof). Appropriate transcriptional terminators are those that are known to function in plants and include the CAMV 35S terminator, the tml terminator, the nopaline synthase terminator and the pea rbcs E9 terminator. These can be used in both monocotyledons and dicotyledons. Still other terminators that can be used include heterologous terminators derived from Arabidopsis genes, such as the terminators of SEQ ID NOS: 16-17. In addition, a gene's native transcription terminator may be used. In one example embodiment, the native transcription terminator of the nucleic acid (R-gene) encoding a polypeptide conferring increased pathogen resistance is used, such as the native terminator of SEQ ID NO: 18. Termination regions used in the expression cassettes can also be obtained from, e.g., the Ti-plasmid of A. tumefaciens, such as the octopine synthase and nopaline synthase termination regions. See also Guerineau et al. (1991) Mol. Gen. Genet. 262: 141-144; Proudfoot (1991) Cell 64:671-674; Sanfacon et al. (1991) Genes Dev. 5: 141-149; Mogen et al. (990) Plant Cell 2: 1261-1272; Munroe et al. (1990) Gene 91: 151-158; Ballas et al. (1989) Nucleic Acids Res. 17:7891-7903; and Joshi et al. (1987) Nucleic Acids Res. 15:9627-9639.

[0164] Additional regulatory signals include, but are not limited to, transcriptional initiation start sites, operators, activators, enhancers, other regulatory elements, ribosomal binding sites, an initiation codon, termination signals, and the like. See, for example, U.S. Pat. Nos. 5,039,523 and 4,853,331; EPO 0480762A2; Sambrook et al. (1992) Molecular Cloning: A Laboratory Manual, ed. Maniatis et al. (Cold Spring Harbor Laboratory Press, Cold Spring Harbor, N.Y.), hereinafter “Sambrook 11”; Davis et al, eds. (1980).

[0165] In preparing the expression cassette, the various DNA fragments may be manipulated, so as to provide for the DNA sequences in the proper orientation and, as appropriate, in the proper reading frame. Toward this end, adapters or linkers may be employed to join the DNA fragments or other manipulations may be involved to provide for convenient restriction sites, removal of superfluous DNA, removal of restriction sites, or the like. For this purpose, in vitro mutagenesis, primer repair, restriction, annealing, resubstitutions, e.g., transitions and transversions, may be involved A variety of promoters that are constitutively active or specifically active in vegetative tissues, such as leaves, stems, roots and tubers, can be used to express the nucleic acid or R-gene of the present invention. The promoters can be selected based on the desired outcome. The nucleic acids can be combined with constitutive, inducible, tissue-preferred, or other promoters for expression in the organism of interest. See, for example, promoters set forth in WO 99/43838 and in U.S. Pat. Nos. 8,575,425; 7,790,846; 8,147,856; 8,586832; 7,772,369; 7,534,939; 6,072,050; 5,659,026; 5,608,149; 5,608,144; 5,604,121; 5,569,597; 5,466,785; 5,399,680; 5,268,463; 5,608,142; and 6,177,611; herein incorporated by reference. In some embodiments, the promoter used to drive the expression of the polynucleotides provided herein comprises an exogenous promoter not found in plants in nature, for example, a synthetic promoter. In some embodiments, the promoter used to drive the expression of the polynucleotides provided herein comprises a heterologous promoter sourced from an organism that is different from the organism from where the R-gene is sourced. In example embodiments, the nucleic acid comprising the R-gene is expressed in soybean plants wherein the expression is driven by a plant promoter derived from Medicago truncatula, such as the promoters of SEQ ID NOS: 13-14.

[0166] In embodiments, the promoter may also optionally comprise an intron. In some embodiments, a promoter comprises or consists of the about 2 kb region upstream (5′) of the translation start site of a known or predicted coding sequence. In other embodiments, the promoter is a minimal or core promoter comprising only those elements that are required to initiate transcription. For example, a minimal promoter may consist of a transcription start site (TSS), a binding site for RNA polymerase, and a transcription factor binding site (such as a TATA box or B recognition element). Such minimal promoter may not comprise any introns or splice sites.

[0167] In some embodiments, the promoter used herein to drive the expression of the polynucleotides provided herein comprises a native promoter or an active variant or fragment thereof. For purpose of this disclosure, the term “native promoter,” used interchangeably with the term “endogenous promoter,” refers to a promoter that is found in plants in nature. An active variant or fragment of a native promoter refers to a promoter sequence that has one or more nucleotide substitutions, deletions, or insertions and that can drive expression of an operably-linked polynucleotide sequence under conditions similar to those under which the native promoter is active. Such active variants or fragments may be created by site-directed mutagenesis, induced mutation, or may occur as allelic variants (polymorphisms). In some embodiments, the native promoter comprises a polynucleotide having the sequence of SEQ ID NO: 15. In some embodiments, disclosed herein is a construct comprising a native promoter (e.g., a native promoter comprising SEQ ID NO: 15) or its active variant or fragment operably linked to a polynucleotide encoding a polypeptide having the sequence of SEQ ID NO: 5, or a fragment or variant of SEQ ID NO: 5 (e.g., having least 85%, 90%, 91%, 92%, 93%, 94%, 95%, 96%, 97%, 98%, or 99% identity to the native promoter, wherein the variant or fragment thereof retains the ability to direct expression of a sequence of interest); and when introduced into a plant, the construct confers increased pathogen resistance. In some embodiments, the native promoter is a heterologous promoter to the polynucleotide.

[0168] The translation leader sequence means a DNA molecule located between the promoter of a gene and the coding sequence. The translation leader sequence is present in the fully processed mRNA upstream of the translation start sequence. The translation leader sequence may affect processing of the primary transcript to mRNA, mRNA stability or translation efficiency. Examples of translation leader sequences include maize and petunia heat shock protein leaders, plant virus coat protein leaders, plant rubisco gene leaders among others (Turner and Foster, Molecular Biotechnology 3:225, 1995).

[0169] The “3′ non-translated sequences” (or 3′ untranslated sequences or 3′-UTR) means DNA sequences located downstream of a structural polynucleotide sequence and include sequences encoding polyadenylation and other regulatory signals capable of affecting mRNA processing or gene expression. The polyadenylation signal functions in plants to cause the addition of multiple adenylate nucleotides to the 3′ end of the mRNA precursor. The polyadenylation sequence can be derived from the natural gene, from a variety of plant genes, or from T-DNA. An example of the polyadenylation sequence is the nopaline synthase 3′ sequence (nos 3′; Fraley et al., Proc. Natl. Acad. Sci. USA 80: 4803-4807, 1983). The use of different 3′ non-translated sequences is exemplified by Ingelbrecht et al., Plant Cell 1:671-680, 1989. In embodiments of the present invention, the nucleic acid encoding a polypeptide conferring increased pathogen resistance comprises the native or endogenous 3′-UTR of the R-gene, such as the 3′-UTR of SEQ ID NO: 20.

[0170] The “5′ non-translated sequences” (or 5′ untranslated sequences or 5′-UTR) means DNA sequences located upstream of an initiation codon of structural polynucleotide sequence and include sequences capable of affecting translation of an mRNA sequence. The 5′-UTR sequence is also referred to as a leader sequence. In different organisms, the 5′-UTR may remain untranslated, and form complex secondary structures to regulate translation of the downstream sequence. The leader sequence can be derived from the natural gene or from a variety of plant genes. In embodiments of the present invention, the nucleic acid encoding a polypeptide conferring increased pathogen resistance comprises the native or endogenous 5′-UTR of the R-gene, such as the 5′-UTR of SEQ ID NO: 19.

[0171] As used herein, the term “intron” refers to a nucleotide sequence provided within a gene (that is, in an intragenic region) and that is removed by splicing during maturation of a final RNA product. Thus, introns are non-coding regions of an RNA transcript, or the DNA encoding it. Introns may have regulatory function, such as due to the presence of transcriptional enhancer or repressor sequences embedded therein. Example introns include introns derived from Arabidopsis genes, such as the intron of SEQ ID NO: 21. Introns separate exons such that splicing results in removal of introns and joining of exons. Introns are marked by the presence of conserved sequences known as splice sites at 5′ and 3′ ends. Typically, the splice site at the 5′ end includes an AG sequence and the splice site at the 3′ end includes a GU sequence. Splicing of the introns is catalyzed by a spliceosome comprising RNA and proteins. Promoter sequences can, in some embodiments (e.g., for larger promoter sequences such as those for proximal or distal promoters) include an intron. In other embodiments, as described herein, introns may be optionally coupled to a minimal or core promoter sequence, as well as to a nucleic acid encoding a protein of interest, to improve expression of the protein.

[0172] This in embodiments, novel regulatory elements are disclosed for the expression of polynucleotides and polypeptides in a plant cell. In particular embodiments, the novel regulatory elements are used for the expression of polynucleotides and polypeptides that when expressed in a plant cell confer the plant with increased pathogen resistance, such as to ASR. The novel regulatory elements include native promoters comprising the nucleotide sequence of SEQ ID NO: 15, or an active variant or fragment to SEQ ID NO: 15 (e.g., having at least 90%, 91%, 92%, 93%, 94%, 95%, 96%, 97%, 98%, or 99% sequence identity to SEQ ID NO: 15 and retaining the ability to drive expression of an operably linked polynucleotide of interest). In other embodiments, the promoter set forth in SEQ ID 15 is operably linked to a polynucleotide encoding the polypeptide of interest. In specific embodiments, the polynucleotide sequence of interest encodes a polypeptide that upon expression in a plant cell increases resistance of the plant cell to a plant pathogen, such as ASR. Such polypeptides include, but are not limited to, the polypeptide of SEQ ID NO: 5 or an active variant or fragment thereof or polypeptides encoding R-genes as set forth in any one of US Patent publication No. US 20200354739 and PCT Publications Nos. WO2019103918, WO2021154632A1, WO2021022022, WO2021022026, WO2021022101, WO2021260673, and WO2021263249, the contents of each of which are herein incorporated by reference in their entirety.

[0173] The novel regulatory elements further include native terminators comprising the nucleotide sequence of SEQ ID NO: 18, or a sequence that is substantially identical to SEQ ID NO: 18 (e.g., having at least 90% or at least 95% sequence identity). The novel regulatory elements further include native 5′- and 3′-UTRs comprising the nucleotide sequence of SEQ ID NO: 19 and/or 20, or a sequence that is substantially identical to SEQ ID NOS: 19 and/or 20 (e.g., having at least 90% or at least 95% sequence identity).

[0174] The polynucleotide of the invention comprises any coding sequence that can express the novel R-gene and encode a polypeptide that confers increased pathogen resistance. In particular embodiments, the coding sequence comprises any polynucleotide that encodes a polypeptide having the amino acid sequence of SEQ ID NO: 5, or an amino acid sequence having at least 90% or at least 95% sequence identity to SEQ ID NO: 5 and conferring increased pathogen resistance when expressed. In example embodiments, the coding sequence comprises a nucleic acid having the nucleotide sequence of any of SEQ ID NOS: 1, 2-4 and 11-12, or any nucleic acid having at least 90% or at least 95% sequence identity to any of SEQ ID NOS: 1, 2-4 and 11-12.

[0175] In example embodiments, the coding sequence is a cDNA derived nucleotide sequence that comprises the exons of the R-gene spliced together and without the sequence of intervening introns, or upstream and downstream UTRs (for example, the R-gene coding sequence of SEQ ID NO: 12). In other example embodiments, the coding sequence is a genomic DNA derived nucleotide sequence that comprises the exons with any combination of intervening native introns (e.g., one or more or all intervening introns), native 5′ and 3′ UTRs, native promoters and native terminators. One of skill in the art may be able to use standard procedures in recombinant DNA technology to combine any of the coding sequence options with native or exogenous terminators, native or exogenous promoters, and any combination of native or exogenous regulatory elements in the expression cassette.

[0176] In one embodiment, the genomic DNA derived coding sequence of the R-gene of the present invention comprises all the native introns and exons of the gene in addition to the native 5′ and 3′ UTRs and native promoters and terminators (for example, the R-gene coding sequence of SEQ ID NO: 2). In other example embodiments, one or more of the native introns are replaced with a non-native intron, such as with an intron known to enhance transformation, transcriptional, or translational activity in a host cell (for example, the R-gene coding sequences of SEQ ID NOS: 3-4 and 11-12 wherein the first native intron is replaced with the intron of SEQ ID NO: 21). In still further embodiments, the coding sequence comprises the native promoter and terminator as well as native UTRs allowing for the gene expression to be driven by the native promoter (for example, the R-gene coding sequences of SEQ ID NO: 11). In other embodiments, the coding sequence comprises the native UTRs but not the native promoter or terminator to allow for gene expression to be driven by a heterogenous promoter (for example, the R-gene coding sequences of SEQ ID NOS: 3-4).

[0177] The laboratory procedures in recombinant DNA technology used herein are those well-known and commonly employed in the art. Standard techniques are used for cloning, DNA and RNA isolation, amplification and purification. Generally enzymatic reactions involving DNA ligase, DNA polymerase, restriction endonucleases and the like are performed according to the manufacturer's specifications. These techniques and various other techniques are generally performed according to Sambrook et al. (1989).

[0178] The nucleic acids, polynucleotides, nucleotide sequences, R-genes, vectors and DNA constructs of the present invention may be introduced into the genome of a desired plant host by a variety of conventional transformation techniques that are well known to those skilled in the art. “Transformation” refers to a process of stably introducing an exogenous nucleic acid molecule (for example, a DNA construct, a vector, an expression cassette, or a recombinant polynucleic acid molecule) into a cell or protoplast and that exogenous nucleic acid molecule is stably incorporated into a host cell genome or an organelle genome (for example, chloroplast or mitochondria) or is capable of autonomous replication. “Transformed” or “transgenic” refers to a cell, tissue, organ, or organism into which a foreign polynucleic acid, such as a DNA vector or recombinant polynucleic acid molecule, is incorporated and maintained. Further, once stably transformed into a cell, the foreign polynucleic acid can be passed on to a progeny of the cell. A “transgenic”, “transformed”, or “stably transformed” cell or organism also includes progeny of the cell or organism and progeny produced from a breeding program employing such a “transgenic” plant as a parent in a cross and exhibiting an altered phenotype resulting from the presence of the foreign polynucleic acid molecule.

[0179] Methods of transformation of plant cells or tissues include but are not limited to Agrobacterium mediated transformation method and the Biolistics or particle-gun mediated transformation method. Suitable plant transformation vectors for the purpose of Agrobacterium mediated transformation include-those elements derived from a tumor inducing (Ti) plasmid of Agrobacterium tumefaciens, for example, right border (RB) regions and left border (LB) regions, and others disclosed by Herrera-Estrella et al., Nature 303:209 (1983); Bevan, Nucleic Acids Res. 12:8711-8721 (1984); Klee et al., Bio-Technology 3(7):637-642 (1985). In addition to plant transformation vectors derived from the Ti or root-inducing (Ri) plasmids of Agrobacterium, alternative methods can be used to insert the DNA constructs of this invention into plant cells. Such methods may involve, but are not limited to, for example, the use of liposomes, electroporation, chemicals that increase free DNA uptake, free DNA delivery via microprojectile bombardment, and transformation using viruses or pollen.

[0180] DNA constructs, vectors, and expression cassettes can be prepared that incorporate the R-gene coding sequences of the present invention for use in directing the expression of the sequences directly from the host plant cell plastid. Examples of such constructs suitable for this purpose and methods that are known in the art and are generally described, for example, in Svab et al., Proc. Natl. Acad. Sci. USA 87:8526-8530, (1990) and Svab et al., Proc. Natl. Acad. Sci. USA 90:913-917 (1993) and in U.S. Pat. No. 5,693,507.

[0181] When adequate numbers of cells containing the exogenous nucleic acid molecule encoding polypeptides from the present invention are obtained, the cells can be cultured, then regenerated into whole plants. “Regeneration” refers to the process of growing a plant from a plant cell (for example, plant protoplast or explant). Such regeneration techniques rely on manipulation of certain phytohormones in a tissue culture growth medium, typically relying on a biocide and/or herbicide marker that has been introduced together with the desired nucleotide sequences. Choice of methodology for the regeneration step is not critical See, for example, Ammirato et al., Handbook of Plant Cell Culture-Crop Species. Macmillan Publ. Co. (1984); Shimamoto et al., Nature 338:274-276 (1989); Fromm, UCLA Symposium on Molecular Strategies for Crop Improvement, Apr. 16-22, 1990. Keystone, Colo. (1990); Vasil et al., Bio/Technology 8:429-434 (1990); Vasil et al., Bio/Technology 10:667-674 (1992); Hayashimoto, Plant Physiol. 93:857-863 (1990); and Datta et al., Bio-technology 8:736-740 (1990). Such regeneration techniques are described generally in Klee et al., Ann. Rev. Plant Phys. 38:467-486 (1987).

[0182] The development or regeneration of transgenic plants containing the exogenous polynucleic acid molecule that encodes a polypeptide of interest is well known in the art. Preferably, the regenerated plants are self-pollinated to provide homozygous transgenic plants, as discussed above. Otherwise, pollen obtained from the regenerated plants is crossed to seed-grown plants of agronomically important lines. Conversely, pollen from plants of these important lines is used to pollinate regenerated plants.

[0183] In certain embodiments, the polynucleotides of the invention encoding a protein conferring enhanced pathogen resistance can be stacked with any combination of polynucleotide sequences of interest in order to create plants with a desired trait. A trait, as used herein, refers to the phenotype derived from a particular sequence or groups of sequences. For example, the polynucleotides encoding the novel R gene may be stacked with any other polynucleotides encoding polypeptides that confer a desirable trait, including but not limited to resistance to diseases, insects, and herbicides, tolerance to heat and drought, reduced time to crop maturity, improved industrial processing, such as for the conversion of starch or biomass to fermentable sugars, and improved agronomic quality, such as high oil content and high protein content.

[0184] In a particular embodiment of the invention, polynucleotides may be stacked (or, alternatively, multiple expression cassettes may be stacked on a single polynucleotide) so as to express more than one R-gene within a plant. This is a particular advantage where, for example, one R-gene is particularly suitable for providing resistance to one class of plant pathogens (e.g., a first rust isolate) while the other provides resistance to a different class of plant pathogens (or a different result isolate). In alternate embodiments, a first R-gene is provided that provides resistance via a first mode of action against a plant pathogen (e.g., against ASR) while the other provides resistance to the same plant pathogen via a second, different mode of action. Herein, the synergistic effect of the different modes of action of the different R-genes can provide a higher increase in overall pathogen resistance than either R-gene by itself. Stacking polypeptides encoded by different R-genes is also an advantage where one polypeptide expresses inherent pathogen-resistance but is somewhat labile.

[0185] Exemplary polynucleotides encoding proteins that confer increased pathogen resistance that may be stacked with polynucleotides of the invention include polynucleotides encoding proteins that confer increased ASR resistance as described in US Patent publication Nos. US 20200354739 and PCT Publications Nos. WO2019103918, WO2021154632A1, WO2021022022, WO2021022026, WO2021022101, WO2021260673, and WO2021263249, each of which is incorporated by reference in its entirety.

[0186] Exemplary polynucleotides that may be stacked with polynucleotides of the invention encoding a novel R-gene include polynucleotides encoding polypeptides conferring resistance to pests/pathogens such as viruses, nematodes, insects or fungi, and the like. Exemplary polynucleotides that may be stacked with polynucleotides of the invention include polynucleotides encoding: polypeptides having pesticidal and/or insecticidal activity, such as other Bacillus thuringiensis toxic proteins (described in U.S. Pat. Nos. 5,366,892; 5,747,450; 5,737,514; 5,723,756; 5,593,881; and Geiser et al. (1986) Gene 48:109), lectins (Van Damme et al. (1994) Plant Mol. Biol. 24:825, pentin (described in U.S. Pat. No. 5,981,722), and the like; traits desirable for disease or herbicide resistance (e.g., fumonisin detoxification genes (U.S. Pat. No. 5,792,931); avirulence and disease resistance genes (Jones et al. (1994) Science 266:789; Martin et al. (1993) Science 262:1432; Mindrinos et al. (1994) Cell 78:1089); a gene encoding an aryloxyalkanoate dioxygenase conferring resistance to certain classes of auxin and acetylCoA carboxylase herbicides (e.g. in PCT Publication Nos. WO 2008/141154, WO 2007/053482 or a tfdA gene giving resistance to 2,4 D in U.S. Pat. No. 6,153,401); a gene encoding a dicamba monoxygenase (Behrens et al. (2007) Science, 316, 1185) conferring resistance to dicamba; a gene encoding a homogentisate solanesyltransferase (HST) conferring resistance to HST-inhibiting herbicides (PCT Publication No. WO 2010/029311); a gene encoding a nitrilase conferring resistance to a nitrile-containing herbicide (e.g the bxnA bromoxynil nitrilase); acetolactate synthase (ALS) mutants that lead to herbicide resistance such as the S4 and/or Hra mutations; glyphosate resistance (e.g., 5-enol-pyrovyl-shikimate-3-phosphate-synthase (EPSPS) gene, described in U.S. Pat. Nos. 4,940,935 and 5,188,642; or the glyphosate N-acetyltransferase (GAT) gene, described in Castle et al. (2004) Science, 304:1151-1154; and in U.S. Patent Application Publication Nos. 20070004912, 20050246798, and 20050060767)); glufosinate resistance (e.g, phosphinothricin acetyl transferase genes PAT and BAR, described in U.S. Pat. Nos. 5,561,236 and 5,276,268); a cytochrome P450 or variant thereof that confers herbicide resistance or tolerance to, inter alia, HPPD herbicides (U.S. Patent Application Publication No. 20090011936; U.S. Pat. Nos. 6,380,465; 6,121,512; 5,349,127; 6,649,814; and 6,300,544; and PCT Publication No. WO 2007/000077); and traits desirable for processing or process products such as high oil (e.g., U.S. Pat. No. 6,232,529); modified oils (e.g., fatty acid desaturase genes (U.S. Pat. No. 5,952,544; PCT Publication No. WO 94/11516)); modified starches (e.g., ADPG pyrophosphorylases (AGPase), starch synthases (SS), starch branching enzymes (SBE), and starch debranching enzymes (SDBE)); and polymers or bioplastics (e.g., U.S. Pat. No. 5,602,321; beta-ketothiolase, polyhydroxybutyrate synthase, and acetoacetyl-CoA reductase (Schubert et al. (1988) J. Bacteriol. 170:5837-5847) facilitate expression of polyhydroxyalkanoates (PHAs)).

[0187] These stacked combinations can be created by any method including, but not limited to, cross-breeding plants by any conventional or TopCross methodology, or genetic transformation. If the sequences are stacked by genetically transforming the plants, the polynucleotide sequences of interest can be combined at any time and in any order. For example, a transgenic plant comprising one or more desired traits can be used as the target to introduce further traits by subsequent transformation. The traits can be introduced simultaneously in a co-transformation protocol with the polynucleotides of interest provided by any combination of transformation cassettes. For example, if two sequences will be introduced, the two sequences can be contained in separate transformation cassettes (trans) or contained on the same transformation cassette (cis). Expression of the sequences can be driven by the same promoter or by different promoters. In certain cases, it may be desirable to introduce a transformation cassette that will suppress the expression of the polynucleotide of interest. This may be combined with any combination of other suppression cassettes or overexpression cassettes to generate the desired combination of traits in the plant. It is further recognized that polynucleotide sequences can be stacked at a desired genomic location using a site-specific recombination system. See, for example, PCT Publication Nos. WO 99/25821, WO 99/25854, WO 99/25840, WO 99/25855, and WO 99/25853.

### Disease Resistant Soybean Plants and Germplasms

[0188] In the plants provided herein, the polynucleotides as described earlier this disclosure is a heterologous nucleic acid sequence in the genome of the plant. As used herein, the term “heterologous” in the context of a chromosomal segment refers to one or more DNA sequences (e.g., genetic loci) in a configuration in which they are not found in nature, for example as a result of a recombination event between homologous chromosomes during meiosis, or for example as a result of introduction of a transgenic sequence, or for example as a result of modification through gene editing.

[0189] Although soybean plants are used to exemplify the composition and methods throughout the application, a polynucleotide as provided herein may be introduced to any plant species, including, but not limited to, monocots and dicots. Examples of plants of interest include, but are not limited to, corn (maize), sorghum, wheat, sunflower, tomato, crucifers, peppers, potato, cotton, rice, soybean, sugarbeet, sugarcane, tobacco, barley, and oilseed rape, Brassica sp., alfalfa, rye, millet, safflower, peanuts, sweet potato, cassava, coffee, coconut, pineapple, citrus trees, cocoa, tea, banana, avocado, fig, guava, mango, olive, papaya, cashew, macadamia, almond, oats, vegetables, ornamentals, and conifers.

[0190] Glycine (soybean or soya bean) is a genus in the bean family Fabaceae. The Glycine plants can be Glycine arenaria, Glycine argyrea, Glycine cyrtoloba, Glycine canescens, Glycine clandestine, Glycine curvata, Glycine falcata, Glycine latifolia, Glycine microphylla, Glycine pescadrensis, Glycine stenophita, Glycine syndetica, Glycine soja Seib. Et Zucc., Glycine max (L.) Merrill., Glycine tabacina, or Glycine tomentella.

[0191] In some embodiments, the plants provided herein are elite plants or derived from an elite line.

[0192] As used herein, an “elite line” is an agronomically superior line that has resulted from many cycles of breeding and selection for superior agronomic performance. Numerous elite lines are available and known to those of skill in the art of soybean breeding. An “elite population,” is an assortment of elite individuals or lines that can be used to represent the state of the art in terms of agronomically superior genotypes of a given crop species, such as soybean. Similarly, an “elite germplasm” or elite strain of germplasm is an agronomically superior germplasm, typically derived from, and/or can give rise to, a plant with superior agronomic performance, such as an existing or newly developed elite line of soybean.

[0193] An “elite” plant is any plant from an elite line, such that an elite plant is a representative plant from an elite variety. In some embodiments, the soybean plant comprising a polynucleotide encoding any one of the polypeptides disclosed herein is an elite soybean plant. Non-limiting examples of elite soybean varieties that are commercially available to farmers or soybean breeders include: AG00802, A0868, AG0902, A1923, AG2403, A2824, A3704, A4324, A5404, AG5903, AG6202 AG0934; AG1435; AG2031; AG2035; AG2433; AG2733; AG2933; AG3334; AG3832; AG4135; AG4632; AG4934; AG5831; AG6534; and AG7231 (Asgrow Seeds, Des Moines, Iowa, USA); BPR0144RR, BPR 4077NRR and BPR 4390NRR (Bio Plant Research, Camp Point, Ill., USA); DKB 17-51 and DKB37-51 (DeKalb Genetics, DeKalb, Ill., USA); DP 4546 RR, and DP 7870 RR (Delta & Pine Land Company, Lubbock, Tex., USA); JG 03R501, JG 32R606C ADD and JG 55R503C (JGL Inc., Greencastle, Ind., USA); NKS 13-K2 (NK Division of Syngenta Seeds, Golden Valley, Minnesota, USA); 90M01, 91M30, 92M33, 93M11, 94M30, 95M30, 97B52, P008T22R2; P16T17R2; P22T69R; P25T51R; P34T07R2; P35T58R; P39T67R; P47T36R; P46T21R; and P56T03R2 (Pioneer Hi-Bred International, Johnston, Iowa, USA); SG4771NRR and SG5161NRR/STS (Soygenetics, LLC, Lafayette, Ind., USA); S00-K5, S11-L2, S28-Y2, S43-B1, S53-A1, S76-L9, S78-G6, S0009-M2; S007-Y4; S04-D3; S14-A6; S20-T6; S21-M7; S26-P3; S28-N6; S30-V6; S35-C3; S36-Y6; S39-C4; S47-K5; S48-D9; S52-Y2; S58-Z4; S67-R6; S73-S8; and S78-G6 (Syngenta Seeds, Henderson, Ky., USA); Richer (Northstar Seed Ltd. Alberta, CA); 14RD62 (Stine Seed Co. Ia., USA); or Armor 4744 (Armor Seed, LLC, Ar., USA).

[0194] A Disease resistant soybean plant or germplasm of the present invention may be produced by any method whereby an R-gene of the present invention is introduced into the soybean plant or germplasm, including, but not limited to, transformation, protoplast transformation or fusion, a double haploid technique, embryo rescue, gene editing, conventional breeding, and/or by any other nucleic acid transfer system.

[0195] In some embodiments, the soybean plant or germplasm comprises a non-naturally occurring variety of soybean. In some embodiments, the soybean plant or germplasm is at least about 50%, 55%, 60%, 65%, 70%, 75%, 80%, 85%, 90%, 95%, 96%, 97%, 98%, 99% or 100% identical to that of an elite variety of soybean.

[0196] The disease resistant soybean plant or germplasm may be the progeny of a cross between an elite variety of soybean and a variety of soybean that comprises an R-gene for enhanced Disease tolerance or resistance (e.g. ASR) wherein the R-gene is a novel gene encoding a protein that confers increased pathogen resistance; a R-gene that is substantially identical to any of SEQ ID NOs: 1, 2-4, 11-12; or a R-gene encoding a polypeptide that is substantially identical to SEQ ID NO: 5 while conferring or enhancing pathogen resistance (e.g., ASR resistance) in the plant. In many examples, alternative embodiments of the R-gene will have at least 90%, 91%, 92%, 93%, 94%, 95%, 96%, 97%, 98%, or 99% homology to any of SEQ ID NOs: 1, 2-4, and 11-12. In many examples, alternative embodiments of the R-gene will have at least 90%, 91%, 92%, 93%, 94%, 95%, 96%, 97%, 98%, or 99% homology to a nucleic acid molecule encoding the polypeptide of SEQ ID NO: 5, or a nucleic acid molecule encoding a polypeptide having at least 90% homology to SEQ ID NO: 5, while providing ASR resistance in the plant. In many examples, the polypeptide encoded by the R-gene will have at least 90%, at least 91%, at least 92%, at least 93%, at least 94%, at least 95%, at least 96%, at least 97%, at least 98%, or at least 99% homology to SEQ ID NO: 5.

[0197] In particular embodiments, the disease resistant soybean plant or germplasm may be the progeny of a cross between an elite variety of soybean and a variety of soybean that comprises an R-gene for enhanced Disease tolerance (e.g. ASR) wherein the R-gene is a novel gene encoding a protein conferring enhanced pathogen resistance, wherein the R-gene is substantially identical to any of SEQ ID NOs: 1, 2-4, 11-12, or a R-gene encoding a polypeptide that is substantially identical to SEQ ID NO: 5 while conferring ASR resistance in the plant. In many examples, alternative embodiments of the R-gene will have at least 90%, 91%, 92%, 93%, 94%, 95%, 96%, 97%, 98%, or 99% homology to any of SEQ ID NOs: 1, 2-4, 11-12. In many examples, alternative embodiments of the R-gene will have at least 90%, 91%, 92%, 93%, 94%, 95%, 96%, 97%, 98%, or 99% homology to a nucleotide sequence encoding the polypeptide of SEQ ID NO: 5. In many examples, the polypeptide encoded by the R-gene of SEQ ID NOs: 1, 2-4, and 11-12 will comprise one of at least 90%, at least 91%, at least 92%, at least 93%, at least 94%, at least 95%, at least 96%, at least 97%, at least 98%, or at least 99% homology to SEQ ID NO: 5 while conferring ASR resistance.

[0198] The disease resistant soybean plant or germplasm may be the progeny of an introgression wherein the recurrent parent is an elite variety of soybean and the donor comprises an R-gene associated with enhanced disease tolerance and/or resistance wherein the donor carries a R-gene having substantial identity to any of SEQ ID NOs: 1, 2-4, and 11-12 or a R-gene encoding a polypeptide having substantial identity to SEQ ID NO: 5. In some embodiments, the plant will comprise a R-gene having at least 90%, 91%, 92%, 93%, 94%, 95%, 96%, 97%, 98%, or 99% homology to any of SEQ ID NOs: 1, 2-4, 11-12 and increased tolerance to tolerance to ASR as compared to a plant not comprising the R-gene. In some embodiments, the plant will comprise a R-gene encoding a protein having at least 90%, 91%, 92%, 93%, 94%, 95%, 96%, 97%, 98%, or 99% homology to SEQ ID NO: 5 and increased tolerance to tolerance to ASR as compared to a plant not comprising the R-gene.

[0199] The disease resistant soybean plant or germplasm may be the progeny of a cross between a first elite variety of soybean (e.g., a tester line) and the progeny of a cross between a second elite variety of soybean (e.g., a recurrent parent) and a variety of soybean that comprises an R-gene.

[0200] A disease resistant soybean plant and germplasm of the present invention may comprise one or more R-genes of the present invention (e.g., any of SEQ ID NOs: 1, 2, 3, 4, 6, 7, 11 and 12).

[0201] In some embodiments, the plants provided herein can comprise one or more additional polynucleotides that encode an additional polypeptide that can confer a phenotype of increased pathogen resistance.

[0202] In specific embodiments, the plants, plant parts or seeds having the heterologous polynucleotide or polypeptide disclosed herein or active variants and fragment thereof can have a modified level of expression of the polynucleotide or polypeptide (i.e., an increase or a decrease in expression level). In other embodiments, the plants, plant parts or seeds having the heterologous polynucleotide or polypeptide disclosed herein or active variants and fragment thereof can have a modified level of activity of the polypeptide (i.e., an increase or a decrease in activity level). Methods to generate such modified levels of expression or activity are disclosed elsewhere herein and include, but are not limited to, breeding, gene editing, and transgenic techniques.

[0203] Plants produced as described above can be propagated to produce progeny plants, and the progeny plants that have stably incorporated into its genome a polynucleotide conferring increased pathogen resistance can be selected and can be further propagated if desired. The term “progeny,” refers to the descendant(s) of a particular cross. Typically, progeny result from breeding of two individuals, although some species (particularly some plants and hermaphroditic animals) can be selfed (i.e., the same plant acts as the donor of both male and female gametes). The descendant(s) can be, for example, of the F1, the F2, or any subsequent generation.

[0204] In addition to the phenotypic traits, the genetic characteristic of the plant as represented by its genetic marker profile can be used to select plants of desired traits. The term “marker-based selection” refers to the use of genetic markers to detect one or more nucleic acids from the plant, where the nucleic acid is associated with a desired trait to identify plants that carry genes for desirable (or undesirable) traits. Markers include but are not limited to Restriction Fragment Length Polymorphisms (RFLPs), Randomly Amplified Polymorphic DNAs (RAPDs), Arbitrarily Primed Polymerase Chain Reaction (AP-PCR), DNA Amplification Fingerprinting (DAF), Sequence Characterized Amplified Regions (SCARs), Amplified Fragment Length Polymorphisms (AFLPs), Simple Sequence Repeats (SSRs) which are also referred to as Microsatellites, and Single Nucleotide Polymorphisms (SNPs). There are known sets of public markers that are being examined by ASTA and other industry groups for their applicability in standardizing determinations of what constitutes an essentially derived variety under the US Plant Variety Protection Act. However, these standard markers do not limit the type of marker and marker profile which can be employed in breeding or developing backcross conversions, or in distinguishing varieties or plant parts or plant cells or verify a progeny pedigree. Primers and PCR protocols for assaying these and other markers are disclosed in the Soybase (sponsored by the USDA Agricultural Research Service and Iowa State University) located at the world wide web at 129.186.26.94/SSR.html.

[0205] In one embodiment, the markers used to identify the plants comprising the polynucleotides disclosed herein are SNPs. Non-limiting examples of SNP genotyping methods include hybridization, primer extension, oligonucleotide ligation, nuclease cleavage, minisequencing and coded spheres. Such methods are well known and disclosed in e.g., Gut, I. G., Hum. Mutat. 17: 475-492 (2001); Shi, Clin. Chem. 47(2): 164-172 (2001); Kwok, Pharmacogenomics 1(1): 95-100 (2000); and Bhattramakki and Rafalski, Discovery and application of single nucleotide polymorphism markers in plants, in PLANT GENOTYPING: THE DNA FINGERPRINTING OF PLANTS, CABI Publishing, Wallingford (2001). A wide range of commercially available technologies utilize these and other methods to interrogate SNPs, including Masscode Sup™/Sup (Qiagen, Germantown, MD, (Hologic, Madison, WI), (Applied Biosystems, Foster City, CA), (Applied Biosystems, Foster City, CA) and Beadarrays Sup™/Sup (Illumina, San Diego, CA).

[0206] In some embodiments, an assay (e.g., generally a two-step allelic discrimination assay or similar), a KASP Sup™/Sup assay (generally a one-step allelic discrimination assay defined below or similar), or both can be employed to identify the SNPs that associate with increased pathogen resistance. In an exemplary two-step assay, a forward primer, a reverse primer, and two assay probes that recognize two different alleles at the SNP site (or hybridization oligos) are employed. The forward and reverse primers are employed to amplify genetic loci that comprise SNPs that are associated with increased pathogen resistance. The particular nucleotides that are present at the SNP positions are then assayed using the probes. In some embodiments, the assay probes and the reaction conditions are designed such that an assay probe will only hybridize to the reverse complement of a 100% perfectly matched sequence, thereby permitting identification of which allele (s) that are present based upon detection of hybridizations. In some embodiments, the probes are differentially labeled with, for example, fluorophores to permit distinguishing between the two assay probes in a single reaction. Exemplary methods of amplifying include employing a polymerase chain reaction (PCR) or ligase chain reaction (LCR) using a nucleic acid isolated from a soybean plant or germplasm as a template in the PCR or LCR.

[0207] In some embodiments, a number of SNP alleles together within a sequence, or across linked sequences, can be used to describe a haplotype for any particular genotype. Ching et al., BMC Genet. 3: 19 (2002) (14 pages); Gupta et al., (2001) Curr Sci. 80:524-535, Rafalski, Plant Sci. 162: 329-333 (2002). In some cases, haplotypes can be more informative than single SNPs and can be more descriptive of any particular genotype. For example, a single SNP may be allele “T” for a specific disease resistant line or variety, but the allele “T” might also occur in the soybean breeding population being utilized for recurrent parents. In this case, a combination of alleles at linked SNPs may be more informative. Once a unique haplotype has been assigned to a donor chromosomal region, that haplotype can be used in that population or any subset thereof to determine whether an individual has a particular gene. The use of automated high throughput marker detection platforms known to those of ordinary skill in the art makes this process highly efficient and effective.

[0208] These SNP markers can be used in a marker assisted breeding program to move traits, such as native traits or traits conferred by transgenes or traits conferred by genome editing, into the a desired plant background. As used herein, the term “native trait” refers to a trait already existing in germplasm, including wild relatives of crop species, or that can be produced by recombination of existing traits. For example, progeny plants from a cross between a donor soybean plant comprising in its genome a nucleic acid sequence encoding SEQ ID NO: 1, 2-4, 11 or 12, and a recipient soybean plant not comprising said nucleic acid sequence can be screened to detect the presence of the markers associated with increased pathogen resistance profile. Plants comprising said markers can be selected and verified for increased pathogen resistance as compared to control plants. In embodiments of the invention, plants comprising in their genome a nucleic acid sequence encoding SEQ ID NO: 1, 2-4, 11 or 12 can be identified, detected, or selected using any combination of the “favorable” SNP markers of Table 1 and/or 2.

[0209] Also provided herein are the kits and primers that can be used to introduce a polynucleotide sequence as described in this disclosure into a recipient plant or to detect a polynucleotide sequence as described in this disclosure in a plant.

[0210] In some embodiments, the kit may also comprise one or more probes having a sequence corresponding to or complementary to a sequence having 80% to 100% sequence identity with a specific region of the transgenic event or gene editing event. In some embodiments, the kit may comprise any reagent and material required to perform the assay or detection method.

[0211] In embodiments, molecular marker-based assays can be used to select parent lines for propagation and also to select progeny plants. In example embodiments, such marker-based assays may use any of the SNP markers of Table 1 and/or 2 to identify a plant with a “favorable” allele associated with the increased pathogen resistance trait. In embodiments, primer-based assays may be used to detect for the presence of an amplicon comprising the novel R-gene of the present invention. In example embodiments, such primer-based assays may use the primer pair of SEQ ID NOS: 8-9 or any of the primer pairs listed in Table 6. Further, a probe may be used to detect for the presence of the amplicon, such as using any probe listed in Table 6 or the probe of SEQ ID NO: 10.

[0212] In some embodiments, a plant cell, seed, or plant part or harvest product can be obtained from the plant produced as above and the plant cell, seed, or plant part can be screened using methods disclosed above for the evidence of stable incorporation of the polynucleotide. The term “stable incorporation” refers to the integration of a nucleic acid sequence into the genome of a plant and said nucleic acid sequence is capable of being inherited by the progeny thereof. As used herein, the term “plant part” indicates a part of a plant, including single cells and cell tissues such as plant cells that are intact in plants, cell clumps and tissue cultures from which plants can be regenerated. Examples of plant parts include, but are not limited to, single cells and tissues from pollen, ovules, zygotes, leaves, embryos, roots, root tips, anthers, flowers, flower parts, fruits, stems, shoots, cuttings, and seeds; as well as pollen, ovules, egg cells, zygotes, leaves, embryos, roots, root tips, anthers, flowers, flower parts, fruits, stems, shoots, cuttings, scions, rootstocks, seeds, protoplasts, calli, and the like.

[0213] In some embodiments, plant products can be harvested from the plant disclosed above and processed to produce processed products, such as flour, soy meal, oil, starch, and the like. These processed products are also within the scope of this invention provided that they comprise a polynucleotide or polypeptide or variant thereof disclosed herein. Other soybean plant products include but are not limited to protein concentrate, protein isolate, soybean hulls, meal, flower, oil and the whole soybean itself.

### Disease Resistant Soybean Seeds

[0214] The present invention provides disease resistant soybean seeds. As discussed above, the methods of the present invention may be utilized to identify, produce and/or select a disease resistant soybean seed. In addition to the methods described above, a disease resistant soybean seed may be produced by any method whereby an R-gene is introduced into the soybean seed, including, but not limited to, transformation, protoplast transformation or fusion, a double haploid technique, embryo rescue, genetic editing (e.g. CRISPR or TALEN or MegaNucleases) and/or by any other nucleic acid transfer system.

[0215] In some embodiments, the disease resistant soybean seed comprises a non-naturally occurring variety of soybean. In some embodiments, the soybean seed is at least about 50%, 55%, 60%, 65%, 70%, 75%, 80%, 85%, 90%, 95%, 96%, 97%, 98% or 99% identical to that of an elite variety of soybean.

[0216] The disease resistant soybean seed may be produced by a disease resistant soybean plant identified, produced or selected by the methods of the present invention.

[0217] A disease resistant soybean seed of the present invention may comprise, be selected by or produced by use of one or more novel R-genes of the present invention.

### Methods for Producing a Plant Variety that has Increased Pathogen Resistance

[0218] Provided herein are methods of producing a plant that has increased pathogen resistance by introducing a nucleic acid sequence encoding a polypeptide as provided herein. A nucleic acid sequence may be introduced to a plant cell by various ways, for example, by transformation, by genome modification techniques (such as by genome editing), or by breeding. In one aspect, the plant can be produced by transforming the nucleic acid sequence encoding a polypeptide disclosed above into a recipient plant. In one aspect, the method can comprise editing the genome of the recipient plant so that the resulting plant comprises a polynucleotide encoding a polypeptide disclosed above. In yet another aspect, the method can comprise increasing the expression level and/or activity of the above-mentioned proteins in a recipient plant, for example, by enhancing promoter activity or replacing the endogenous promoter with a stronger promoter. In another aspect, the method can comprise breeding a donor plant comprising a polynucleotide as described above with a recipient plant and selecting for incorporation of the polynucleotide into the recipient plant genome.

[0219] In some embodiments, the method comprises transforming a polynucleotide disclosed herein or an active variant or fragment thereof into a recipient plant to obtain a transgenic plant, and said transgenic plant has increased pathogen resistance. Expression cassettes comprising polynucleotides encoding the polypeptides as described above can be used to transform plants of interest.

[0220] As used herein, the term “transgenic” and grammatical variations thereof refer to a plant, including any part derived from the plant, such as a cell, tissue or organ, in which a heterologous nucleic acid is integrated into the genome. In specific embodiments, the heterologous nucleic acid is a recombinant construct, vector or expression cassette comprising one or more nucleic acids. In other embodiments, a transgenic plant is produced by a genetic engineering method, such as Agrobacterium transformation. Through gene technology, the heterologous nucleic acid is stably integrated into chromosomes, so that the next generation can also be transgenic. As used herein, “transgenic” and grammatical variations thereof also encompass biological treatments, which include plant hybridization and/or natural recombination.

[0221] Transformation results in a transformed plant, including whole plants, as well as plant organs (e.g., leaves, stems, roots, etc.), seeds, plant cells, propagules, embryos and progeny of the same. Plant cells can be differentiated or undifferentiated (e.g., callus, suspension culture cells, protoplasts, leaf cells, root cells, phloem cells, pollen). Transformation may result in stable or transient incorporation of the nucleic acid into the cell. “Stable transformation” is intended to mean that the nucleotide construct introduced into a host cell integrates into the genome of the host cell and is capable of being inherited by the progeny thereof. “Transient transformation” is intended to mean that a polynucleotide is introduced into the host cell and does not integrate into the genome of the host cell.

[0222] Methods for transformation typically involve introducing a nucleotide construct into a plant. In some embodiments, the transformation method is an Agrobacterium-mediated transformation. In some embodiments, the transformation method is a biolistic-mediated transformation. Transformation may also be performed by infection, transfection, microinjection, electroporation, microprojection, biolistics or particle bombardment, electroporation, silica/carbon fibers, ultrasound mediated, PEG mediated, calcium phosphate co-precipitation, poly cation DMSO technique, DEAE dextran procedure, Agrobacterium and viral mediated (e.g., Caulimoriviruses, Geminiviruses, RNA plant viruses), liposome mediated and the like.

[0223] Transformation protocols as well as protocols for introducing polypeptides or polynucleotide sequences into plants may vary depending on the type of plant or plant cell, i.e., monocot or dicot, targeted for transformation. Methods for transformation are known in the art and include those set forth in U.S. Pat. Nos. 8,575,425; 7,692,068; 8,802,934; and 7,541,517; each of which is herein incorporated by reference. See, also, Rakoczy-Trojanowska, M. (2002) Cell Mol Biol Lett. 7:849-858; Jones et al. (2005) Plant Methods, Vol. 1, Article 5; Rivera et al. (2012) Physics of Life Reviews 9:308-345; Bartlett et al. (2008) Plant Methods 4: 1-12; Bates, G. W. (1999) Methods in Molecular Biology 111:359-366; Binns and Thomashow (1988) Annual Reviews in Microbiology 42:57 Sup′/Sup5-606; Christou, P. (1992) The Plant Journal 2:275-281; Christou, P. (1995) Euphytica 85: 13-27; Tzfira et al. (2004) TRENDS in Genetics 20:375-383; Yao et al. (2006) Journal of Experimental Botany 57:3737-3746; Zupan and Zambryski (1995) Plant Physiology 107:

[0224] Methods for transformation of chloroplasts are known in the art. See, for example, Svab et al. (1990) Proc. Natl. Acad. Sci. USA 87(21):8526-8530; Svab and Maliga (1993) Proc. Natl. Acad. Sci. USA 90(3):913-917; Staub and Maliga (1993) EMBO J. 12(2):601-606. The method relies on particle gun delivery of DNA containing a selectable marker and targeting of the DNA to the plastid genome through homologous recombination. Additionally, plastid transformation can be accomplished by transactivation of a silent plastid-borne transgene by tissue-preferred expression of a nuclear-encoded and plastid-directed RNA polymerase. Such a system has been reported in McBride et al. (1994) Proc. Natl. Acad. Sci. USA 91(15):7301-7305.

[0225] The cells that have been transformed may be grown into plants in accordance with conventional ways. See, for example, McCormick et al. (1986) Plant Cell Reports 5:81-84. These plants may then be grown, and either pollinated with the same transformed strain or different strains, and the resulting hybrid having constitutive expression of the desired phenotypic characteristic identified. Two or more generations may be grown to ensure that expression of the desired phenotypic characteristic is stably maintained and inherited and then seeds harvested to ensure expression of the desired phenotypic characteristic has been achieved. In this manner, the present invention provides transformed seed (also referred to as “transgenic seed”) having a nucleotide construct of the invention, for example, an expression cassette of the invention, stably incorporated into their genome.

[0226] In some embodiments, the method comprises crossing a donor plant comprising a polynucleotide encoding a polypeptide disclosed herein with a recipient plant, and the polypeptide is able to confer increased pathogen resistance in the recipient plant. As used herein, the terms “crossing” and “breeding” refer to the fusion of gametes to produce progeny (e.g., by fertilization, such as to produce seed by pollination in plants). In some embodiments, a “cross,” “breeding,” or “cross-fertilization” is fertilization of one individual by another (e.g., cross-pollination in plants). The plant disclosed herein may be a whole plant, or may be a plant cell, seed, or tissue, or a plant part such as leaf, stem, pollen, or cell that can be cultivated into a whole plant.

[0227] In some embodiments, a progeny plant created by the crossing or breeding process is repeatedly crossed back to one of its parents through a process referred to herein as “backcrossing”. In a backcrossing scheme, the “donor” parent refers to the parental plant with the desired gene or locus to be introgressed. The “recipient” parent (used one or more times) or “recurrent” parent (used two or more times) refers to the parental plant into which the gene or locus is being introgressed. For example, see Ragot, M. et al. Marker-assisted Backcrossing: A Practical Example, in Techniques et Utilisations des Marqueurs Moleculaires Les Colloques, Vol. 72, pp. 45-56 (1995); and Openshaw et al., Marker-assisted Selection in Backcross Breeding, in Proceedings of the Symposium “Analysis of Molecular Marker Data,” pp. 41-43 (1994). The initial cross gives rise to the F1 generation. The term “BC1” refers to the second use of the recurrent parent, “BC2” refers to the third use of the recurrent parent, and so on.

[0228] In some embodiments, the donor soybean plant is a Glycine max plant. In some embodiments, the donor soybean plant is a Glycine soja plant. In some embodiments, the recipient soybean plant is an elite Glycine max plant or an elite Glycine soja plant.

[0229] In some embodiments, the polynucleotide sequences provided herein can be targeted to specific sites within the genome of a recipient plant cell. Such methods include, but are not limited to, meganucleases designed against the plant genomic sequence of interest CRISPR-Cas9, TALENs, and other technologies for precise editing of genomes (Feng, et al. Cell Research 23: 1229-1232, 2013, WO 2013/026740); Cre-lox site-specific recombination; FLP-FRT recombination (Li et al. (2009) Plant Physiol 151:1087-1095); Bxbl-mediated integration (Yau et al. Plant J (2011) 701: 147-166); zinc-finger mediated integration (Wright et al. (2005) Plant J 44:693-705); Cai et al. (2009) Plant Mol Biol 69:699-709); and homologous recombination (Lieberman-Lazarovich and Levy (2011) Methods Mol Biol: 51-65); prime editing and transposases (Anzalone, A. et al., Nat Biotechnol. 2020 July; 38(7):824-844); translocation; and inversion.

[0230] Various embodiments of the methods described herein use gene editing. In some embodiments, gene editing is used to mutagenize the genome of a plant to produce plants having one or more of the polypeptides that is able to confer increased pathogen resistance.

[0231] In some embodiments, provided herein are plants transformed with and expressing gene-editing machinery as described above, which, when crossed with a target plant, result in gene editing in the target plant. In general, gene editing may involve transient, inducible, or constitutive expression of the gene editing components or systems. Gene editing may involve genomic integration or episomal presence of the gene editing components or systems.

[0232] Gene editing generally refers to the use of a site-directed nuclease (including but not limited to CRISPR/Cas, zinc fingers, meganucleases, and the like) to cut a nucleotide sequence at a desired location. This may be to cause an insertion/deletion (“indel”) mutation, (i.e., “SDN1”), a base edit (i.e., “SDN2”), or allele insertion or replacement (i.e., “SDN3”). SDN2 or SDN3 gene editing may comprise the provision of one or more recombination templates (e.g., in a vector) comprising a gene sequence of interest that can be used for homology directed repair (HDR) within the plant (i.e., to be introduced into the plant genome). In some embodiments, the gene or allele of interest is one that is able to confer to the plant an improved trait, e.g., increased pathogen resistance, increased ASR resistance, etc. The recombination template can be introduced into the plant to be edited either through transformation or through breeding with a donor plant comprising the recombination template. Breaks in the plant genome may be introduced within, upstream, and/or downstream of a target sequence. In some embodiments, a double strand DNA break is made within or near the target sequence locus. In some embodiments, breaks are made upstream and downstream of the target sequence locus, which may lead to its excision from the genome. In some embodiments, one or more single strand DNA breaks (nicks) are made within, upstream, and/or downstream of the target sequence (e.g., using a nickase Cas9 variant). Any of these DNA breaks, as well as those introduced via other methods known to one of skill in the art, may induce HDR. Through HDR, the target sequence is replaced by the sequence of the provided recombination template comprising a polynucleotide of interest, e.g., SEQ ID NO: 2-4, 11, 12 or a polynucleotide encoding a polypeptide having the sequence of SEQ ID NO: 5 may be provided on/as a template. By designing the system such that one or more single strand or double strand breaks are introduced within, upstream, and/or downstream of the corresponding region in the genome of a plant not comprising the gene sequence of interest, this region can be replaced with the template. In some embodiments, the polynucleotide of interest is operably linked to a promoter and the expression of the polynucleotide of interest controlled by the promoter conferred increased pathogen resistance to the plant. In some embodiments, the promoter is a native promoter or an active variant or fragment thereof as described above. In some embodiments, the native promoter comprises SEQ ID NO: 15.

[0233] In some embodiments, mutations in the genes of interest described herein may be generated without the use of a recombination template via targeted introduction of DNA double strand breaks. Such breaks may be repaired through the process of non-homologous end joining (NHEJ), which can result in the generation of small insertions or deletions (indels) at the repair site. Such indels may lead to frameshift mutations causing premature stop codons or other types of loss-of-function mutations in the targeted genes.

[0234] In some embodiments, gene editing may involve transient, inducible, or constitutive expression of the gene editing components or systems in the target plant. Gene editing may also involve genomic integration or episomal presence of the gene editing components or systems in the target plant.

[0235] In certain embodiments, the nucleic acid modification or mutation is effected by a (modified) zinc-finger nuclease (ZFN) system. The ZFN system uses artificial restriction enzymes generated by fusing a zinc finger DNA-binding domain to a DNA-cleavage domain that can be engineered to target desired DNA sequences. Exemplary methods of genome editing using ZFNs can be found for example in U.S. Pat. Nos. 6,534,261; 6,607,882; 6,746,838; 6,794,136; 6,824,978; 6,866,997; 6,933,113; and 6,979,539.

[0236] In certain embodiments, the nucleic acid modification is effected by a (modified) meganuclease, which are endodeoxyribonucleases characterized by a large recognition site (double-stranded DNA sequences of 12 to 40 base pairs). Exemplary method for using meganucleases can be found in U.S. Pat. Nos. 8,163,514; 8,133,697; 8,021,867; 8,119,361; 8,119,381; 8,124,369; and 8,129,134, which are specifically incorporated by reference.

[0237] In certain embodiments, the nucleic acid modification is effected by a (modified) CRISPR/Cas complex or system. In certain embodiments, the CRISPR/Cas system or complex is a class 2 CRISPR/Cas system. In certain embodiments, said CRISPR/Cas system or complex is a type II, type V, or type VI CRISPR/Cas system or complex. The CRISPR/Cas system does not require the generation of customized proteins to target specific sequences but rather a single Cas protein can be programmed by an RNA guide (gRNA) to recognize a specific nucleic acid target, in other words the Cas enzyme protein can be recruited to a specific nucleic acid target locus (which may comprise or consist of RNA and/or DNA) of interest using said short RNA guide.

[0238] In general, the CRISPR/Cas or CRISPR system is as used herein foregoing documents refers collectively to transcripts and other elements involved in the expression of or directing the activity of CRISPR-associated (“Cas”) genes, including sequences encoding a Cas gene and one or more of, a tracr (trans-activating CRISPR) sequence (e.g. tracrRNA or an active partial tracrRNA), a tracr-mate sequence (encompassing a “direct repeat” and a tracrRNA-processed partial direct repeat in the context of an endogenous CRISPR system), a guide sequence (also referred to as a“spacer” in the context of an endogenous CRISPR system), or “RNA(s)” as that term is herein used (e.g., RNA(s) to guide Cas, such as Cas9, e.g. CRISPR RNA and, where applicable, transactivating (tracr) RNA or a single guide RNA (sgRNA) (chimeric RNA)) or other sequences and transcripts from a CRISPR locus. In general, a CRISPR system is characterized by elements that promote the formation of a CRISPR complex at the site of a target sequence (also referred to as a protospacer in the context of an endogenous CRISPR system). In the context of formation of a CRISPR complex, “target sequence” refers to a sequence to which a guide sequence is designed to have complementarity, where hybridization between a target sequence and a guide sequence promotes the formation of a CRISPR complex. A target sequence may comprise any polynucleotide, such as DNA or RNA polynucleotides.

[0239] In certain embodiments, the gRNA is a chimeric guide RNA or single guide RNA (sgRNA). In certain embodiments, the gRNA comprises a guide sequence and a tracr mate sequence (or direct repeat). In certain embodiments, the gRNA comprises a guide sequence, a tracr mate sequence (or direct repeat), and a tracr sequence. In certain embodiments, the CRISPR/Cas system or complex as described herein does not comprise and/or does not rely on the presence of a tracr sequence (e.g. if the Cas protein is Cas12a).

[0240] The Cas protein as referred to herein, such as but not limited to Cas9, Cas12a (formerly referred to as Cpf1), Cas12b (formerly referred to as C2c1), Cas13a (formerly referred to as C2c2), C2c3, Cas13b protein, may originate from any suitable source, and hence may include different orthologues, originating from a variety of (prokaryotic) organisms, as is well documented in the art. In certain embodiments, the Cas protein is (modified) Cas9, preferably (modified) Staphylococcus aureus Cas9 (SaCas9) or (modified) Streptococcus pyogenes Cas9 (SpCas9). In certain embodiments, the Cas protein is Cas12a, optionally from Acidaminococcus sp., such as Acidaminococcus sp. BV3L6 Cpf1 (AsCas12a) or Lachnospiraceae bacterium Cas12a, such as Lachnospiraceae bacterium MA2020 or Lachnospiraceae bacterium MD2006 (LBCas12a). See U.S. Pat. No. 10,669,540, incorporated herein by reference in its entirety. Alternatively, the Cas12a protein may be from Moraxella bovoculi AAX08_00205 [Mb2Cas12a] or Moraxella bovoculi AAX11_00205 [Mb3Cas12a]. See WO 2017/189308, incorporated herein by reference in its entirety. In certain embodiments, the Cas protein is (modified) C2c2, preferably Leptotrichia wadei C2c2 (LwC2c2) or Listeria newyorkensis FSL M6-0635 C2c2 (LbFSLC2c2). In certain embodiments, the (modified) Cas protein is C2c1. In certain embodiments, the (modified) Cas protein is C2c3. In certain embodiments, the (modified) Cas protein is Cas13b. Other Cas enzymes are available to a person skilled in the art.

[0241] Gene editing methods and compositions are also disclosed in U.S. Pat. Nos. 10,519,456 and 10,285,348 82, the entire content of which is herein incorporated by reference.

[0242] The gene-editing machinery (e.g., the DNA modifying enzyme) introduced into the plants can be controlled by any promoter that can drive recombinant gene expression in plants. In some embodiments, the promoter is a constitutive promoter. In some embodiments, the promoter is a tissue-specific promoter, e.g., a pollen-specific promoter or a sperm cell specific promoter, a zygote specific promoter, or a promoter that is highly expressed in sperm, eggs and zygotes (e.g., prOsActin1). Suitable promoters are disclosed in U.S. Pat. No. 10,519,456, the entire content of which is herein incorporated by reference.

[0243] In another aspect, provided herein is a method of editing plant genomic DNA. In some embodiments, the method comprises using a first soybean plant expressing a DNA modification enzyme and at least one optional guide nucleic acid as described above to pollinate a target plant comprising genomic DNA to be edited.

[0244] The various polynucleotides and variants thereof provided herein can be stacked with one or more polynucleotides encoding a desirable trait such as a polynucleotide that confers, for example, insect, disease or herbicide resistance or other desirable agronomic traits of interest including, but not limited to, traits associated with high oil content; high protein content; increased digestibility; balanced amino acid content; and high energy content. Such traits may refer to properties of both seed and non-seed plant tissues, or to food or feed prepared from plants or seeds having such traits.

[0245] As used herein, gene or trait “stacking” is combining desired genes or traits into one transgenic plant line. As one approach, plant breeders stack transgenic traits by making crosses between parents that each have a desired trait and then identifying offspring that have both of these desired traits (so-called “breeding stacks”). Another way to stack genes is by transferring two or more genes into the cell nucleus of a plant at the same time during transformation. Another way to stack genes is by re-transforming a transgenic plant with another gene of interest. For example, gene stacking can be used to combine two different insect resistance traits, an insect resistance trait and a disease resistance trait, or a herbicide resistance trait (such as, for example, Btl1). The use of a selectable marker in addition to a gene of interest would also be considered gene stacking.

[0246] In some embodiments, a nucleic acid molecule or vector of the disclosure can include an additional coding sequence for one or more polypeptides or double stranded RNA molecules (dsRNA) of interest for agronomic traits that primarily are of benefit to a seed company, grower or grain processor. A polypeptide of interest can be any polypeptide encoded by a nucleotide sequence of interest. Non-limiting examples of polypeptides of interest that are suitable for production in plants include those resulting in agronomically important traits such as herbicide resistance (also sometimes referred to as “herbicide tolerance”), virus resistance, bacterial pathogen resistance, insect resistance, nematode resistance, or fungal resistance. See, e.g., U.S. Pat. Nos. 5,569,823; 5,304,730; 5,495,071; 6,329,504; and 6,337,431. The polypeptide also can be one that increases plant vigor or yield (including traits that allow a plant to grow at different temperatures, soil conditions and levels of sunlight and precipitation), or one that allows identification of a plant exhibiting a trait of interest (e.g., a selectable marker, seed coat color, relative maturity group, etc.). Various polypeptides of interest, as well as methods for introducing these polypeptides into a plant, are described, for example, in U.S. Pat. Nos. 4,761,373; 4,769,061; 4,810,648; 4,940,835; 4,975,374; 5,013,659; 5,162,602; 5,276,268; 5,304,730; 5,495,071; 5,554,798; 5,561,236; 5,569,823; 5,767,366; 5,879,903, 5,928,937; 6,084,155; 6,329,504 and 6,337,431; as well as US Patent Publication No. 2001/0016956.

[0247] Polynucleotides conferring resistance/tolerance to an herbicide that inhibits the growing point or meristem, such as an imidazalinone or a sulfonylurea can also be suitable in some embodiments. Exemplary polynucleotides in this category code for mutant ALS and AHAS enzymes as described, e.g., in U.S. Pat. Nos. 5,767,366 and 5,928,937. U.S. Pat. Nos. 4,761,373 and 5,013,659 are directed to plants resistant to various imidazalinone or sulfonamide herbicides. U.S. Pat. No. 4,975,374 relates to plant cells and plants containing a nucleic acid encoding a mutant glutamine synthetase (GS) resistant to inhibition by herbicides that are known to inhibit GS, e.g., phosphinothricin and methionine sulfoximine. U.S. Pat. No. 5,162,602 discloses plants resistant to inhibition by cyclohexanedione and aryloxyphenoxypropanoic acid herbicides. The resistance is conferred by an altered acetyl coenzyme A carboxylase (ACCase).

[0248] Polypeptides encoded by nucleotides sequences conferring resistance to glyphosate are also suitable for the disclosure. See, e.g., U.S. Pat. Nos. 4,940,835 and 4,769,061. U.S. Pat. No. 5,554,798 discloses transgenic glyphosate resistant maize plants, which resistance is conferred by an altered 5-enolpyruvyl-3-phosphoshikimate (EPSP) synthase gene.

[0249] Polynucleotides coding for resistance to phosphono compounds such as glufosinate ammonium or phosphinothricin, and pyridinoxy or phenoxy propionic acids and cyclohexones are also suitable. See, European Patent Application No. 0 242 246. See also, U.S. Pat. Nos. 5,879,903, 5,276,268, and 5,561,236.

[0250] Other suitable polynucleotides include those coding for resistance to herbicides that inhibit photosynthesis, such as a triazine and a benzonitrile (nitrilase) See, U.S. Pat. No. 4,810,648. Additional suitable polynucleotides coding for herbicide resistance include those coding for resistance to 2,2-dichloropropionic acid, sethoxydim, haloxyfop, imidazolinone herbicides, sulfonylurea herbicides, triazolopyrimidine herbicides, s-triazine herbicides and bromoxynil. Also suitable are polynucleotides conferring resistance to a protox enzyme, or that provide enhanced resistance to plant diseases; enhanced tolerance of adverse environmental conditions (abiotic stresses) including but not limited to drought, excessive cold, excessive heat, or excessive soil salinity or extreme acidity or alkalinity; and alterations in plant architecture or development, including changes in developmental timing. See, e.g., U.S. Patent Publication No. 2001/0016956 and U.S. Pat. No. 6,084,155.

[0251] Additional suitable polynucleotides include those coding for insecticidal polypeptides. These polypeptides may be produced in amounts sufficient to control, for example, insect pests (i.e., insect controlling amounts). It is recognized that the amount of production of an insecticidal polypeptide in a plant necessary to control insects or other pests may vary depending upon the cultivar, type of pest, environmental factors and the like. Polynucleotides useful for additional insect or pest resistance include, for example, those that encode toxins identified in Bacillus organisms. Polynucleotides comprising nucleotide sequences encoding Bacillus thuringiensis (Bt) Cry proteins from several subspecies have been cloned and recombinant clones have been found to be toxic to lepidopteran, dipteran and/or coleopteran insect larvae. Examples of such Bt insecticidal proteins include the Cry proteins such as Cry1Aa, Cry1Ab, Cry1Ac, Cry1B, Cry1C, Cry1D, Cry1Ea, Cry1Fa, Cry3A, Cry9A, Cry9B, Cry9C, and the like, as well as vegetative insecticidal proteins such as Vip1, Vip2, Vip3, and the like. A full list of Bt-derived proteins can be found on the worldwide web at Bacillus thuringiensis Toxin Nomenclature Database maintained by the University of Sussex (see also, Crickmore et al. (1998) Microbiol. Mol. Biol. Rev. 62:807-813).

[0252] In embodiments, an additional polypeptide is an insecticidal polypeptide derived from a non-Bt source, including without limitation, an alpha-amylase, a peroxidase, a cholesterol oxidase, a patatin, a protease, a protease inhibitor, a urease, an alpha-amylase inhibitor, a pore-forming protein, a chitinase, a lectin, an engineered antibody or antibody fragment, a Bacillus cereus insecticidal protein, a Xenorhabdus spp. (such as X. nematophila or X. bovienii) insecticidal protein, a Photorhabdus spp. (such as P. luminescens or P. asymobiotica) insecticidal protein, a Brevibacillus spp. (such as B. laterosporous) insecticidal protein, a Lysinibacillus spp. (such as L. sphearicus) insecticidal protein, a Chromobacterium spp. (such as C. subtsugae or C. piscinae) insecticidal protein, a Yersinia spp. (such as Y. entomophaga) insecticidal protein, a Paenibacillus spp. (such as P. propylaea) insecticidal protein, a Clostridium spp. (such as C. bifermentans) insecticidal protein, a Pseudomonas spp. (such as P. fluorescens) and a lignin.

[0253] Polypeptides that are suitable for production in plants further include those that improve or otherwise facilitate the conversion of harvested plants or plant parts into a commercially useful product, including, for example, increased or altered carbohydrate content or distribution, improved fermentation properties, increased oil content, increased protein content, modified oil profile, improved digestibility, and increased nutraceutical content, e.g., increased phytosterol content, increased tocopherol content, increased stanol content or increased vitamin content. Polypeptides of interest also include, for example, those resulting in or contributing to a reduced content of an unwanted component in a harvested crop, e.g., phytic acid, or sugar degrading enzymes. By “resulting in” or “contributing to” is intended that the polypeptide of interest can directly or indirectly contribute to the existence of a trait of interest (e.g., increasing cellulose degradation by the use of a heterologous cellulase enzyme).

[0254] In some embodiments, the polypeptide contributes to improved digestibility for food or feed. Xylanases are hemicellulolytic enzymes that improve the breakdown of plant cell walls, which leads to better utilization of the plant nutrients by an animal. This leads to improved growth rate and feed conversion. Also, the viscosity of the feeds containing xylan can be reduced. Heterologous production of xylanases in plant cells also can facilitate lignocellulosic conversion to fermentable sugars in industrial processing.

[0255] Numerous xylanases from fungal and bacterial microorganisms have been identified and characterized (see, e.g., U.S. Pat. No. 5,437,992; Coughlin et al. (1993) “Proceedings of the Second TRICEL Symposium on Trichoderma reesei Cellulases and Other Hydrolases” Espoo; Souminen and Reinikainen, eds. (1993) Foundation for Biotechnical and Industrial Fermentation Research 8:125-135; U.S. Patent Publication No. 2005/0208178; and PCT Publication No. WO 03/16654). In particular, three specific xylanases (XYL-I, XYL-II, and XYL-III) have been identified in T. reesei (Tenkanen et al. (1992) Enzyme Microb. Technol. 14:566; Torronen et al. (1992) Bio/Technology 10:1461; and Xu et al. (1998) Appl. Microbiol. Biotechnol. 49:718).

[0256] In other embodiments, a polypeptide useful for the disclosure can be a polysaccharide degrading enzyme. Plants of this disclosure producing such an enzyme may be useful for generating, for example, fermentation feedstocks for bioprocessing. In some embodiments, enzymes useful for a fermentation process include alpha amylases, proteases, pullulanases, isoamylases, cellulases, hemicellulases, xylanases, cyclodextrin glycotransferases, lipases, phytases, laccases, oxidases, esterases, cutinases, granular starch hydrolyzing enzyme and other glucoamylases.

[0257] Polysaccharide-degrading enzymes include: starch degrading enzymes such as α-amylases (EC 3.2.1.1), glucuronidases (E.C. 3.2.1.131); exo-1,4-α-D glucanases such as amyloglucosidases and glucoamylase (EC 3.2.1.3), β-amylases (EC 3.2.1.2), α-glucosidases (EC 3.2.1.20), and other exo-amylases; starch debranching enzymes, such as a) isoamylase (EC 3.2.1.68), pullulanase (EC 3.2.1.41), and the like; b) cellulases such as exo-1,4-3-cellobiohydrolase (EC 3.2.1.91), exo-1,3-β-D-glucanase (EC 3.2.1.39), β-glucosidase (EC 3.2.1.21); c) L-arabinases, such as endo-1,5-α-L-arabinase (EC 3.2.1.99), α-arabinosidases (EC 3.2.1.55) and the like; d) galactanases such as endo-1,4-β-D-galactanase (EC 3.2.1.89), endo-1,3-β-D-galactanase (EC 3.2.1.90), α-galactosidase (EC 3.2.1.22), β-galactosidase (EC 3.2.1.23) and the like; e) mannanases, such as endo-1,4-β-D-mannanase (EC 3.2.1.78), β-mannosidase (EC 3.2.1.25), α-mannosidase (EC 3.2.1.24) and the like; f) xylanases, such as endo-1,4-β-xylanase (EC 3.2.1.8), β-D-xylosidase (EC 3.2.1.37), 1,3-β-D-xylanase, and the like; and g) other enzymes such as α-L-fucosidase (EC 3.2.1.51), α-L-rhamnosidase (EC 3.2.1.40), levanase (EC 3.2.1.65), inulanase (EC 3.2.1.7), and the like. In one embodiment, the α-amylase is the synthetic α-amylase, Amy797E, described is U.S. Pat. No. 8,093,453, herein incorporated by reference in its entirety.

[0258] Further enzymes which may be used with the disclosure include proteases, such as fungal and bacterial proteases. Fungal proteases include, but are not limited to, those obtained from Aspergillus, Trichoderma, Mucor and Rhizopus, such as A. niger, A. awamori, A. oryzae and M. miehei. In some embodiments, the polypeptides of this disclosure can be cellobiohydrolase (CBH) enzymes (EC 3.2.1.91). In one embodiment, the cellobiohydrolase enzyme can be CBH1 or CBH2.

[0259] Other enzymes useful with the disclosure include, but are not limited to, hemicellulases, such as mannases and arabinofuranosidases (EC 3.2.1.55); ligninases; lipases (e.g., E.C. 3.1.1.3), glucose oxidases, pectinases, xylanases, transglucosidases, alpha 1,6 glucosidases (e.g., E.C. 3.2.1.20); esterases such as ferulic acid esterase (EC 3.1.1.73) and acetyl xylan esterases (EC 3.1.1.72); and cutinases (e.g., E.C. 3.1.1.74).

[0260] Double stranded RNA molecules useful with the disclosure include but are not limited to those that suppress target insect genes. As used herein the words “gene suppression”, when taken together, are intended to refer to any of the well-known methods for reducing the levels of protein produced as a result of gene transcription to mRNA and subsequent translation of the mRNA. Gene suppression is also intended to mean the reduction of protein expression from a gene or a coding sequence including posttranscriptional gene suppression and transcriptional suppression. Posttranscriptional gene suppression is mediated by the homology between of all or a part of a mRNA transcribed from a gene or coding sequence targeted for suppression and the corresponding double stranded RNA used for suppression and refers to the substantial and measurable reduction of the amount of available mRNA available in the cell for binding by ribosomes. The transcribed RNA can be in the sense orientation to effect what is called co-suppression, in the anti-sense orientation to effect what is called anti-sense suppression, or in both orientations producing a dsRNA to effect what is called RNA interference (RNAi). Transcriptional suppression is mediated by the presence in the cell of a dsRNA, a gene suppression agent, exhibiting substantial sequence identity to a promoter DNA sequence or the complement thereof to effect what is referred to as promoter trans suppression. Gene suppression may be effective against a native plant gene associated with a trait, e.g., to provide plants with reduced levels of a protein encoded by the native gene or with enhanced or reduced levels of an affected metabolite. Gene suppression can also be effective against target genes in plant pests that may ingest or contact plant material containing gene suppression agents, specifically designed to inhibit or suppress the expression of one or more homologous or complementary sequences in the cells of the pest. Such genes targeted for suppression can encode an essential protein, the predicted function of which is selected from the group consisting of muscle formation, juvenile hormone formation, juvenile hormone regulation, ion regulation and transport, digestive enzyme synthesis, maintenance of cell membrane potential, amino acid biosynthesis, amino acid degradation, sperm formation, pheromone synthesis, pheromone sensing, antennae formation, wing formation, leg formation, development and differentiation, egg formation, larval maturation, digestive enzyme formation, hemolymph synthesis, hemolymph maintenance, neurotransmission, cell division, energy metabolism, respiration, and apoptosis.

[0261] Non-limiting embodiments of the invention include proteins and nucleic acids that confer increased pathogen resistance when expressed. In embodiments, a polypeptide is selected from: (a) a polypeptide having the amino acid sequence shown in SEQ ID NO: 5, or any portion thereof, and having a heterologous amino acid sequence attached thereto, wherein expression of the polypeptide or portion thereof confers increased pathogen resistance on a plant; (b) a polypeptide comprising the amino acid sequence of SEQ ID NO: 5, and having substitution and/or deletion and/or addition of one or more amino acid residues, wherein expression of the polypeptide confers increased pathogen resistance on the plant; (c) a polypeptide having more than 99%, 98%, 97%, 96%, 95%, 94%, 93%, 92%, 91%, 90%, 85%, or more than 80% sequence identity with the amino acid sequence of SEQ ID NO: 5, wherein the polypeptide when expressed in a plant confers increased pathogen resistance on the plant; or (d) a fusion polypeptide comprising the amino acid sequence of SEQ ID NO: 5, or the polypeptide as defined in any one of (a) to (c). In embodiments, a nucleic acid molecule comprises (a) a nucleotide sequence encoding a protein having an amino acid sequence sharing at least 90%, 91%, 92%, 93%, 94%, 95%, 96%, 97%, 98%, 99%, or 100% sequence identity to SEQ ID NO: 5, wherein said nucleotide sequence comprises a heterologous nucleic acid sequence attached thereto and expression of the nucleic acid molecule confers increased pathogen resistance on the plant; (b) a nucleotide sequence encoding the aforementioned polypeptide; (c) the nucleotide sequence of part (a) comprising a sequence of any one of SEQ ID NOS: 2-4 and 11-12; or (d) the nucleotide sequence of part (a) having at least more than more than 99%, 98%, 97%, 96%, 95%, 94%, 93%, 92%, 91%, 90%, 85%, or more than 80% sequence identity to any one of SEQ ID NOs: 2-4 and 11-12.

[0262] Non-limiting embodiments of the invention include expression cassettes, vectors and DNA constructs comprising the aforementioned nucleic acid molecules and/or expressing the aforementioned polypeptides that confer increased pathogen resistance. In embodiments, an expression cassette comprises the aforementioned nucleic acid molecule of the invention or encodes the aforementioned polypeptide of the invention. In embodiments of the expression cassette, the nucleic acid molecule is operably linked to a promoter capable of directing expression in a plant cell. In some embodiments, the promoter is an endogenous promoter. In other embodiments, the promoter is an exogenous promoter. In particular embodiments, the promoter comprises any one of SEQ ID NOS: 13-15. In embodiments, a vector comprises the aforementioned nucleic acid molecule or the expression cassette. In embodiments, a transgenic cell comprises the nucleic acid molecule or the expression cassette of the invention.

[0263] Non-limiting embodiments include transgenic plants that have increased pathogen resistance. In embodiments, a plant is provided having stably incorporated into its genome a nucleic acid sequence operably linked to a promoter active in the plant, wherein the nucleic acid sequence encodes a polypeptide having: an amino acid sequence that has at least 85%, 90%, 91%, 92%, 93%, 94%, 95%, 96%, 97%, 98%, or 99% sequence identity to SEQID NO: 5; or an amino acid sequence set forth in SEQ ID NO: 5, wherein said nucleic acid sequence is heterologous to the plant, and wherein the plant has increased pathogen resistance as compared to a control plant not comprising the nucleic acid sequence. In embodiments of the plant, the nucleic acid sequence comprises at least 85% identity, at least 90% identity, or at least 95% identity to any one of SEQ ID NOs: 2-4 and 11-12; or the nucleic acid sequence is SEQ ID NO: 2, 3, 4, 11 or 12. In embodiments of the plant, the nucleic acid sequence is introduced into the genome by transgenic expression. In embodiments of the plant, the promoter is an endogenous promoter. In particular embodiments, the endogenous promoter comprises at least 90%, 95%, 96%, 97%, 98%, 99%, or 100% sequence identity to SEQ ID NO: 15. In embodiments of the plant, the promoter is a heterologous promoter comprising at least 90%, 95%, 96%, 97%, 98%, 99%, or 100% sequence identity to SEQ ID NO: 13 or 14. In embodiments of the plant, the promoter is a constitutive promoter, inducible promoter, or a tissue-specific promoter. In particular embodiments, the plant is a dicot plant, such as soybean plant or an elite soybean plant. In other embodiments, the plant is a monocot plant, such as a monocot plant is selected from the group consisting of rice, wheat, maize, and sugar cane. In embodiments, the plant is an agronomically elite plant having a commercially significant yield and/or commercially susceptible vigor, seed set, standability, threshability, abiotic/biotic resistance, or herbicide tolerance. In any of the aforementioned plant embodiments, the plant has increased resistance to any one of the following pathogens: soy cyst nematode, bacterial pustule, root knot nematode, frog eye leaf spot, phytophthora, brown stem rot, nematode, Asian Soybean Rust, smut, Golovinomyces cichoracearum, Erysiphe cichoracearum, Blumeria graminis, Podosphaera xanthii, Sphaerotheca fuliginea, Pythium ultimum, Uncinula necator, Mycosphaerella pinodes, Magnaporthe grisea, Bipolaris oryzae, Magnaporthe grisea, Rhizoctonia solani, Phytophthora sojae, Schizaphis graminum, Bemisia tabaci, Rhopalosiphum maidis, Deroceras reticulatum, Diatraea saccharalis, Schizaphis graminum, Myzus persicae, Sclerotinia sclerotiorum, Macrophomina phaseolina, or Fusarium virguliforme. In particular embodiments, the plant is a soybean plant that has increased resistance to ASR as compared to the control plant.

[0264] Non-limiting embodiments of the invention further include gene edited plants with increased pathogen resistance. Embodiments of gene edited plants include a plant, the genome of which has been edited to comprise a nucleic acid sequence encoding at least one polypeptide having at least 80%, 85%, 90%, 91%, 92%, 93%, 94%, 95%, 96%, 97%, 98%, 99%, or 100% to SEQ ID NO: 5, wherein said polypeptide confers increased pathogen resistance relative to a control plant, wherein the plant does not comprise said nucleic acid sequence before the genome editing. In embodiments of the plant, the nucleic acid sequence is introduced into said plant genome by genome editing of the nucleic acid sequence set forth in any one of SEQ ID NOS: 1, 2, 3 4, 11 and/or 12. In embodiments, the genome editing comprises duplication, inversion, promoter modification, terminator modification and/or splicing modification of the nucleic acid sequence. In particular embodiments, the genome editing is accomplished through CRISPR, TALEN, meganucleases, or through modification of genomic nucleic acids. In embodiments, the gene edited plant is an agronomically elite plant having a commercially significant yield and/or commercially susceptible vigor, seed set, standability, threshability, abiotic/biotic resistance, or herbicide tolerance. In embodiments, the nucleic acid sequence is operably linked to a heterologous promoter, and wherein the heterologous promoter is active in the plant. In particular embodiments, the heterologous promoter active in the plant has at least 95% sequence identity to one of SEQ ID NOS: 13 and 14. In other embodiments, the heterologous promoter is a native promoter or active variant or fragment thereof, and wherein optionally the native promoter has at least 90%, 91%, 92%, 93%, 94%, 95%, 96%, 97%, 98%, 99%, or 100% sequence identity to SEQ ID NO: 15. In particular embodiments, the plant is a soybean plant having increased resistance to Asian Soy Rust relative to the control plant.

[0265] Non-limiting embodiments further include Glycine max plants with increased pathogen resistance. In embodiments, an elite Glycine max plant is provided having in its genome a nucleic acid sequence from a donor Glycine plant, wherein the donor Glycine plant is a different strain from the elite Glycine max plant, and wherein the nucleic acid sequence encodes at least one polypeptide having at least 90%, 91%, 92%, 93%, 94%, 95%, 96%, 97%, 98%, 99%, or 100% sequence identity to SEQ ID NO: 5, wherein said polypeptide confers increased pathogen resistance on the elite Glycine max plant as compared to a control plant not comprising said nucleic acid sequence. In embodiments, the donor Glycine plant is a Glycine tomentella plant, or a progeny thereof. In particular embodiments, the Glycine tomentella plant is a plant of Glycine tomentella accession line PI505267 or a progeny thereof. In further embodiments, the nucleic acid sequence has at least 90%, 91%, 92%, 93%, 94%, 95%, 96%, 97%, 98%, 99%, or 100% sequence identity to any one of SEQ ID NOs: 2-4 and 11-12. In still other embodiments, the nucleic acid sequence has at least 90%, 91%, 92%, 93%, 94%, 95%, 96%, 97%, 98%, 99%, or 100% identity to SEQ ID NO: 1, or a functional fragment thereof, wherein the functional fragment comprises at least at least 10%; at least 15%; at least 20%; at least 25%; at least 30%; at least 35%; at least 40%; at least 45%; at least 50%; at least 55 at least 60%; at least 65%; at least 70%; at least 75%; at least 80%; at least 85%; at least 90%; at least 95%; 96%, 97%, 98%, or 99% of SEQ ID NO: 1 and confers increased pathogen resistance. In embodiments, the nucleic acid sequence comprises a SNP marker associated with increased ASR resistance, wherein said SNP marker is any of the favorable markers of Table 1 and/or 2. In particular embodiments, the nucleic acid sequence from the donor glycine plant is inserted into chromosome 3 of the plant. In embodiments, said nucleic acid sequence is introduced into said plant genome by genome editing of genomic sequences corresponding to and comprising any one of SEQ ID NOs: 1, 2-4, and 11-12, wherein the genome editing confers the elite plant with enhanced resistance to the pathogen, and wherein the gene editing is by CRISPR, TALEN, meganucleases, or through modification of genomic nucleic acids. In other embodiments, said nucleic acid sequence is introduced into said plant genome by transgenic expression of: (a) a nucleic acid sequence having at least 90%, 91%, 92%, 93%, 94%, 95%, 96%, 97%, 98%, 99%, or 100% identity to any one of SEQ ID NOS: 2-4 and 11-12, (b) a nucleic acid sequence encoding a polypeptide having at least 90%, 91%, 92%, 93%, 94%, 95%, 96%, 97%, 98%, 99%, or 100% identity to SEQ ID NO: 5; or (c) a nucleic acid sequence encoding a polypeptide having the sequence of SEQ ID NO: 5; wherein said polypeptide confers enhanced pathogen resistance on the elite Glycine max plant. In particular embodiments, said nucleic acid sequence is introgressed into the genome of said plant through the use of one or more of: (a) chemically induced chromosome doubling; and (b) doubling of an elite Glycine max line to obtain a doubled Glycine max plant before crossing the doubled plant with a Glycine tomentella plant derived from accession line PI505267 or a progeny thereof, as described in Example 3, the Glycine tomentella plant comprising said nucleic acid sequence. In embodiments, the plant has increased resistance to any one or more of the following pathogens: soy cyst nematode, bacterial pustule, root knot nematode, frog eye leaf spot, phytophthora, brown stem rot, nematode, Asian Soybean Rust, smut, Golovinomyces cichoracearum, Erysiphe cichoracearum, Blumeria graminis, Podosphaera xanthii, Sphaerotheca fuliginea, Pythium ultimum, Uncinula necator, Mycosphaerella pinodes, Magnaporthe grisea, Bipolaris oryzae, Magnaporthe grisea, Rhizoctonia solani, Phytophthora sojae, Schizaphis graminum, Bemisia tabaci, Rhopalosiphum maidis, Deroceras reticulatum, Diatraea saccharalis, Schizaphis graminum, Myzus persicae, Sclerotinia sclerotiorum, Macrophomina phaseolina, or Fusarium virguliforme. In particular embodiments, the plant has increased resistance to Asian Soybean Rust. In embodiments, elite Glycine max plant is an agronomically elite Glycine max plant having a commercially significant yield and/or commercially susceptible vigor, seed set, standability, threshability, abiotic/biotic resistance, or herbicide tolerance.

[0266] Non-limiting embodiments of the invention include plants, plant parts and products with increased pathogen resistance. In embodiments, a progeny plant from any of the aforementioned plants is provided, wherein the progeny plant has stably incorporated into its genome the nucleic acid sequence of the invention. In embodiment, a plant cell, seed, or plant part is provided that is derived from any of the aforementioned plants, wherein said plant cell, seed or plant part has stably incorporated into its genome the nucleic acid sequence.

[0267] Non-limiting embodiments of the invention include methods of producing transgenic plants. In embodiments, use of the aforementioned polypeptide or nucleic acid molecule or expression cassette or vector or transgenic cell of the invention is provided in conferring increased resistance to Asian Soy Rust (ASR). In particular embodiments, the method comprises use of the expression cassette of the invention in a cell, wherein the expression level and/or activity of the polypeptide in the cell is increased, and the resistance of the cell to Asian Soy Rust is enhanced. Embodiments include a method for improving the resistance of a plant against ASR, comprising increasing the expression level and/or activity of the polypeptide of the invention in the plant. In embodiments, the increasing comprises increasing the expression level and/or activity of the nucleic acid molecule of the invention in the plant. In embodiments, the increasing the expression level and/or activity in the plant is realized by transgenic means or by breeding. Embodiments are provided for a method for producing a transgenic plant with improved resistance against ASR, comprising: introducing the nucleic acid molecule or the expression cassette of the invention to a recipient plant to obtain a transgenic plant, wherein the transgenic plant has increased resistance against ASR compared to the recipient plant.

[0268] Non-limiting embodiments include methods of producing plants with increased pathogen resistance including by breeding methods. In embodiments, a method of producing a soybean plant having increased pathogen resistance comprises the steps of: a) providing a donor soybean plant comprising in its genome a nucleic acid sequence encoding at least one polypeptide having at least 90% identity or 95% identity to SEQ ID NO: 5, wherein said nucleic acid sequence confers to said donor soybean plant increased pathogen resistance as compared to another donor soybean plant not comprising said nucleic acid sequence in its genome; b) crossing the donor soybean plant of a) with a recipient soybean plant not comprising said nucleic acid sequence; and c) selecting a progeny plant from the cross of b) by detecting the presence of the nucleic acid sequence, or the presence of one or more molecular markers associated with the nucleic acid sequence in the progeny plant, thereby producing a soybean plant having increased pathogen resistance. In embodiments of the method, the molecular marker is a single nucleotide polymorphism (SNP), a quantitative trait locus (QTL), an amplified fragment length polymorphism (AFLP), randomly amplified polymorphic DNA (RAPD), a restriction fragment length polymorphism (RFLP) or a microsatellite. In particular embodiments, the molecular marker is at least one favorable SNP marker selected from Table 1 and/or Table 2, or a molecular marker located within 20 cM, 10 cM, 5 cM, 1 cM, or 0.5 cM of a favorable SNP marker selected from Table 1 or Table 2. In embodiments, one or more of the donor soybean plant and the recipient soybean plant is an elite Glycine max plant. Embodiments include a method for producing a Glycine max plant having increased resistance to ASR, the method comprising the steps of: providing a Glycine tomentella plant line, or progeny thereof comprising a nucleic acid sequence encoding at least one polypeptide having at least 90%, 91%, 92%, 93%, 94%, 95%, 96%, 97%, 98%, 99%, or 100% identity to SEQ ID NO: 5; carrying out the embryo rescue method essentially as described in U.S. Pat. No. 7,842,850 or transgenically; collecting the seeds resulting from the method of b); and regenerating the seeds of c) into plants. In particular embodiments, the Glycine tomentella plant line is accession line PI505267, or a progeny thereof. In embodiments, the nucleic acid sequence is: a nucleic acid sequence comprising at least 85%, 90%, 91%, 92%, 93%, 94%, 95%, 96%, 97%, 98%, 99%, or 100% identity to any one of SEQ ID NOs: 2-4 and 11-12; or the nucleic acid sequence of SEQ ID NO: 2, 3, 4, 11 or 12;

[0269] Embodiments include a method of producing a Glycine max plant with increased resistance to Asian Soy Rust (ASR), the method comprising the steps of: a) isolating a nucleic acid from a Glycine max plant; b) detecting in the nucleic acid of a) at least one molecular marker associated with a nucleic acid sequence comprising any one of SEQ ID NO: 2-4, wherein said nucleic acid sequence confers to the Glycine max plant increased ASR resistance; c) selecting a Glycine max plant based on the presence of the molecular marker detected in b); and d) producing a Glycine max progeny plant from the plant of c) identified as having said molecular marker associated with increased ASR resistance. In embodiments, the molecular marker is a favorable SNP marker selected from Table 1 or Table 2, or a molecular marker located within 20 cM, 10 cM, 5 cM, 1 cM, or 0.5 cM of a favorable SNP marker selected from Table 1 and/or Table 2. In embodiments, the detecting comprises amplifying a molecular marker locus or a portion of the molecular marker locus and detecting the resulting amplified molecular marker amplicon. In embodiments, the amplifying comprises employing a polymerase chain reaction (PCR) or ligase chain reaction (LCR) using a nucleic acid isolated from a soybean plant or germplasm as a template in the PCR or LCR. In particular embodiments, the amplifying further comprises employing a primer pair selected from the group comprising: the primer pair of SEQ ID NOS: 8-9; and a primer pair from the primers of Table 6. In particular embodiments, the detecting further comprises employing a nucleic acid probe selected from the group comprising: the probe of SEQ ID NO: 10 and a probe from the probes of Table 6. In embodiments, the nucleic acid is DNA or RNA. In embodiments, a plant is provided produced by any of the aforementioned methods.

[0270] Non-limiting embodiments include a method of conferring increased ASR resistance to a plant, comprising: a) introducing into the genome of the plant a nucleic acid molecule operably linked to a promoter active in the plant, wherein the nucleic acid sequence is stably incorporated into the genome, wherein the nucleic acid sequence encodes a polypeptide having (i) an amino acid sequence comprising at least 85%, 90%, 91%, 92%, 93%, 94%, 95%, 96%, 97%, 98%, or 99% identity to SEQ ID NO: 5, or (ii) an amino acid sequence as set forth in SEQ ID NO: 5, wherein said nucleic acid sequence is heterologous to the plant, and wherein expression of said nucleic acid sequence increases ASR resistance compared to a control plant not expressing said nucleic acid sequence. In embodiments, the nucleic acid sequence is introduced into the genome of the plant by transformation. In other embodiments, the nucleic acid sequence is introduced into the genome of the plant by crossing a donor plant comprising the nucleic acid sequence with the plant to produce a progeny plant having increased ASR resistance. In particular embodiments, the nucleic acid sequence is inserted into chromosome 3. In particular embodiments, the promoter is an exogenous promoter, and wherein optionally the exogenous promoter comprises SEQ ID NO: 13 or 14. In other embodiments, the promoter is an endogenous promoter, and wherein optionally the endogenous promoter comprises SEQ ID NO: 15. In embodiments, the method further comprises screening for the introduced nucleic acid sequence with PCR and/or sequencing. In particular embodiments, the plant is a dicot plant, and wherein the dicot plant is a soybean plant. In other embodiments, the plant is a monocot plant selected from the group consisting of rice, wheat, maize, and sugar cane. In embodiments, a plant is produced by any of the aforementioned methods.

[0271] In non-limiting embodiments, a primer pair is provided for amplifying the nucleic acid molecule of the invention. In particular embodiments, the primer pair is the primer pair of SEQ ID NOS: 8-9 or a primer pair selected from the primers of Table 6. In embodiments, a primer diagnostic for ASR resistance is provided, wherein said primer can be used in a PCR reaction to indicate the presence of an allele associated with ASR resistance, wherein said allele is any favorable allele as described in Table 1 and/or Table 2 and wherein said primer is any primer selected from the primers of Table 6.

### EXAMPLES

[0272] The following examples are not intended to be a detailed catalog of all the different ways in which the present invention may be implemented or of all the features that may be added to the present invention. Persons skilled in the art will appreciate that numerous variations and additions to the various embodiments may be made without departing from the present invention. Hence, the following descriptions are intended to illustrate some particular embodiments of the invention, and not to exhaustively specify all permutations, combinations and variations thereof.

### Example 1: Identification of an ASR Resistant Wild Glycine Line

[0273] Wild glycine lines were evaluated for ASR resistance against sixteen rust strains collected across a diverse range of environments. The rust data were generated using single pustule derived isolates from USDA-ARS (FL Q09, FL Q12, LABR13, FLQ11) and field populations (FL Q15, NC06, Vero, GLC15, UBL, BR south and BR central). The screening was carried out in contained facilities. Each wild glycine line was evaluated over a multiple day course of infection and rated at various time points. The rating and evaluation were performed using methods well known in the art, based upon Burdon and Speer (Euphytica, 33: 891-896, 1984; also TAG, 1984). Each accession line of interest was screened >2 times with ˜4 plants each time in North & South America using the large diverse panel of rust isolates. Based on the analysis of the rust data, wild Glycine tomentella accession line PI505267 was determined to be an ASR resistant wild glycine line of interest.

### Example 2: Allele Mining & Associations to PI505267 ASR Loci

[0274] Chromosome discovery for causal loci in the tetraploid soybean population, PI505267, was carried out using Data2Bio's Genomic Bulked Segregant Analysis (gBSA) technology (Ames, IA). Data2Bio generated several libraries from DNA samples extracted from two susceptible tissue pools and one resistant tissue pool and sequenced these in eight (8) Illumina HiSeq2000 2×100 bp Paired-End (PE) lanes (San Diego, CA). Processing of raw data including quality trimming, alignment, SNP discovery and SNP impact was performed. After various filtering steps, a plurality of informative SNPs were identified in the PI505267 genome that significantly associated with ASR resistance. A Bayesian approach was then used to calculate trait-associated probabilities. Next, a physical map of trait-associated SNPs (probability cutoff 0.01) for the top contigs were created. Clustering of the SNPs indicated that the ASR resistance loci is located on or near one particular scaffold, Contig 0133 (SEQ ID NO: 1), which was identified and mapped to chromosome 3 of Glycine tomentella accession line PI505267. The context sequences associated with the SNPs from this scaffold were aligned to the public G. max genome to create a chromosome-level understanding of the mapping interval. Data indicated that the causative R-gene(s) may map within or near the interval from 9.28 to 16.48 MB of Contig 0133 on chromosome 3. Genes from this interval were expected to encode polypeptide(s) that may be transgenically expressed or genetically modified (i.e., gene edited via TALEN or CRISPR) in plants to confer disease resistance (e.g., Asian Soy Rust (ASR) resistance).

[0275] A listing of single nucleotide polymorphisms (SNPs) within SEQ ID NO: 1 that associate with ASR resistance is provided below at Tables 1 and 2. SNPs were identified and verified by crossing the ASR resistant line PI505267 with two different susceptible female lines. All alleles for the identified SNPs were determined to be significantly linked with resistance or susceptibility (p<0.05). Detection of the presence of a molecular marker, such as any of the favorable markers of Tables 1 and/or 2, in the nucleic acid isolated from a plant, can be used to identify or select a plant as having the ASR resistance allele derived from the ASR resistant Glycine tomentella line, such as due to the introgression of the chromosomal interval of SEQ ID NO: 1, or a functional fragment thereof (such as functional fragment of the chromosomal interval of SEQ ID NO: 1 comprising the causative R-gene).

TABLE 1
List of SNPs derived from crossing of Resistant male with susceptible female 1. SNPs listed in format: (SNP ID,
SNP position relative to reference genome, Favorable allele, Unfavorable allele), each separated by a space.

(1 9280996 A C); (2 9281013 G A); (3 9281195 C T); (4 9281200 A T); (5 9281201 C A); (6 9281223 C T); (7
9281276 A G); (8 9281485 C T); (9 9281647 G A); (10 9281724 AC A); (11 9281784 A C); (12 9281826 C
T); (13 9281835 G A); (14 9281849 G A); (15 9282235 C T); (16 9283196 G C); (17 9283409 A G); (18
9283754 T C); (19 9283852 T C); (20 9284242 A G); (21 9284284 T A); (22 9284396 C T); (23 9284517 A
T); (24 9284544 A T); (25 9284917 CT C); (26 9285271 A G); (27 9285329 T C); (28 9285641 C A); (29
9285701 A G); (30 9287126 G A); (31 9287346 T G); (32 9287696 T G); (33 9287730 G A); (34 9288083 T
A); (35 9288197 C T); (36 9288204 G GA); (37 9288360 T C); (38 9288370 G A); (39 9288405 G A); (40
9288427 T C); (41 9288663 G T); (42 9288686 T C); (43 9288747 G GTT); (44 9288939 T C); (45 9289360 A
ATTGTGGAAC); (46 9289409 A G); (47 9289584 T C); (48 9290113 A G); (49 9290269 A G); (50 9290321 A
T); (51 9290460 C T); (52 9290465 C T); (53 9290483 T C); (54 9290553 T C); (55 9290730 T G); (56
9291087 C T); (57 9291179 TG T); (58 9291229 G T); (59 9291251 G A); (60 9291357 A T); (61 9291583 C
G); (62 9291658 G A); (63 9291902 T C); (64 9291967 C T); (65 9292150 T C); (66 9292231
ATATGCTGAAAGTTTTT A); (67 9292503 C T); (68 9292772 G A); (69 9292792 G A); (70 9292832 C A); (71
9292848 G A); (72 9292864 A G); (73 9292865 G T); (74 9292866 C T); (75 9293079 G A); (76 9293132 C
T); (77 9293138 G A); (78 9293190 T G); (79 9293329 T C); (80 9293351 T A); (81 9293521 C T); (82
9293588 C T); (83 9293603 A C); (84 9293674 T C); (85 9293699 G A); (86 9293925 C T); (87 9294157 C
A); (88 9294234 A G); (89 9294289 T C); (90 9294612 G T); (91 9294776 C T); (92 9294966 GTA G); (93
9295411 G A); (94 9295472 C T); (95 9295596 T G); (96 9295618 A C); (97 9295751 T C); (98 9295937 A
T); (99 9296123 C CAA); (100 9296379 G A); (101 9296384 T C); (102 9296404 T A); (103 9296487 T
C); (104 9296728 T A); (105 9296787 T C); (106 9296822 T A); (107 9296823 A T); (108 9297264 C G); (109
9297354 A G); (110 9297425 C T); (111 9297796 T C); (112 9297798 T C); (113 9297884 C T); (114
9297889 C T); (115 9297939 T C); (116 9298007 T G); (117 9298047 G A); (118 9298211 T A); (119
9298394 T C); (120 9298626 C A); (121 9298708 A G); (122 9298754 G A); (123 9298845 C T); (124
9298846 T C); (125 9298946 A T); (126 9299120 G T); (127 9299177 C T); (128 9299209 T G); (129
9299247 G A); (130 9299327 C T); (131 9299776 C A); (132 9300267 G T); (133 9300355 A G); (134
9300405 G T); (135 9301458 A G); (136 9301541 CT C); (137 9301543 A G); (138 9301769 G A); (139
9301843 T C); (140 9301914 A AT); (141 9302189 G A); (142 9302192 A G); (143 9302333 T TG); (144
9302588 A G); (145 9302849 T C); (146 9302877 G C); (147 9302948 A G); (148 9302955 G C); (149
9303130 C G); (150 9303367 T C); (151 9303439 A G); (152 9303535 C T); (153 9303598 C T); (154
9303985 C CTACTCAA); (155 9304281 G A); (156 9305374 C T); (157 9305841 C T); (158 9305944 C
T); (159 9305950 C G); (160 9306100 A C); (161 9307000 C T); (162 9307076 A G); (163 9307127 T C); (164
9307261 G A); (165 9307291 A C); (166 9307379 C A); (167 9307667 G A); (168 9307730 T C); (169
9308097 G C); (170 9309199 A G); (171 9309420 T C); (172 9309498 C T); (173 9309860 T G); (174
9309950 AT A); (175 9310002 T C); (176 9310099 T C); (177 9310299 A T); (178 9311612 T A); (179
9311642 C T); (180 9311656 G A); (181 9311677 C T); (182 9311734 T C); (183 9311754 G A); (184
9311759 G A); (185 9311762 TG T); (186 9311835 C T); (187 9311873 G T); (188 9312082 G A); (189
9312273 G A); (190 9312427 T C); (191 9312529 G A); (192 9312575 T C); (193 9312591 G A); (194
9312701 T A); (195 9312872 G A); (196 9312944 C A); (197 9313018 T C); (198 9313213 C A); (199
9313398 C T); (200 9314094 C T); (201 9314218 C A); (202 9314770 A G); (203 9314884 T C); (204
9314924 G T); (205 9315263 A G); (206 9315836 T C); (207 9315999 T G); (208 9316000 A G); (209
9316145 A G); (210 9316189 A G); (211 9316195 C T); (212 9316203 A G); (213 9316326 A G); (214
9316493 C T); (215 9316655 A G); (216 9316656 A C); (217 9316695 CTA C); (218 9316703 A G); (219
9316769 G A); (220 9317531 C A); (221 9317571 G A); (222 9317954 T C); (223 9318210 G A); (224
9318370 T C); (225 9318500 A G); (226 9318582 G A); (227 9318584 G A); (228 9318682 T A); (229
9319112 C G); (230 9319421 T TA); (231 9319821 A G); (232 9319878 T A); (233 9320091 G T); (234
9320107 TTATA T); (235 9320144 T G); (236 9320368 A AT); (237 9320434 T C); (238 9320488 G A); (239
9320514 C T); (240 9320790 GA G); (241 9321074 T C); (242 9321284 T C); (243 9321369 G T); (244
9321439 G A); (245 9321706 A T); (246 9321900 G A); (247 9322060 GT G); (248 9322073 C A); (249
9322310 A C); (250 9322361 A C); (251 9322375 A ACCCACGATG); (252 9322434 T C); (253 9322662 A
G); (254 9322667 C T); (255 9323788 AGG A); (256 9323921 G A); (257 9324043 A G); (258 9324285 T
C); (259 9324748 A C); (260 9324814 T C); (261 9325202 C T); (262 9325253 A G); (263 9325415 A C); (264
9326743 G T); (265 9326764 A G); (266 9326857 T A); (267 9328391 T C); (268 9328946 T C); (269
9329079 C CT); (270 9329095 C T); (271 9329477 T G); (272 9329522 C T); (273 9329916 T C); (274
9330583 T C); (275 9330659 G A); (276 9330685 A G); (277 9331019 T C); (278 9331960 G A); (279
9332360 T C); (280 9332469 A C); (281 9333204 G A); (282 9333391 A AT); (283 9333539 C G); (284
9333657 G A); (285 9334350 T C); (286 9334549 A AT); (287 9334784 T C); (288 9334873 G A); (289
9334946 A G); (290 9335025 C T); (291 9335192 C G); (292 9335202 A G); (293 9335588 TA T); (294
9335684 T G); (295 9335750 C A); (296 9335859 A G); (297 9336658 A G); (298 9336724 G A); (299
9336930 T C); (300 9337090 T A); (301 9337643 A G); (302 9338549 C T); (303 9338644 C T); (304
9339150 C T); (305 9339438 A ACAAAATAAATAAATAATTGAATAAT); (306 9339593 C T); (307 9339699 C
T); (308 9339768 G A); (309 9339829 T C); (310 9340302 G A); (311 9340326 T C); (312 9340921 A
G); (313 9341328 G A); (314 9341768 G A); (315 9342188 C T); (316 9342315 G A); (317 9342331 G
T); (318 9343228 G T); (319 9343447 C T); (320 9343585 G A); (321 9343615 T C); (322 9343690 C
CA); (323 9343735 A G); (324 9344153 C T); (325 9344373 G A); (326 9344431 T C); (327 9344444 A
G); (328 9344866 C T); (329 9344979 G A); (330 9345231 A G); (331 9345406 C T); (332 9345511 A
G); (333 9345659 G A); (334 9345691 G A); (335 9345772 C G); (336 9346602 C T); (337 9346657 G
A); (338 9346848 A G); (339 9346895 A G); (340 9346932 G A); (341 9346956 A T); (342 9347477 C
A); (343 9347538 T C); (344 9347742 C A); (345 9348068 A G); (346 9348125 A G); (347 9348128 G
T); (348 9348652 A G); (349 9348949 C T); (350 9349015 A G); (351 9349036 G C); (352 9349106 G
A); (353 9349497 T C); (354 9349953 G A); (355 9350464 C T); (356 9350510 C T); (357 9350533 G A); (358
9350573 T C); (359 9350648 C T); (360 9351212 C T); (361 9351265 C T); (362 9351282 T A); (363
9351396 A G); (364 9351628 C T); (365 9351657 T C); (366 9352012 C T); (367 9352496 C T); (368
9352590 A G); (369 9352648 C T); (370 9352848 AG A); (371 9353102 T C); (372 9353182 G GC); (373
9353385 G A); (374 9353642 C T); (375 9353739 T C); (376 9355287 A G); (377 9355377 C T); (378
9355580 T C); (379 9355886 T C); (380 9356166 C T); (381 9356258 C T); (382 9356506 C T); (383
9356880 C G); (384 9357432 G T); (385 9357664 T C); (386 9357775 T C); (387 9358155 G A); (388
9358395 T A); (389 9358518 C T); (390 9358636 C T); (391 9358712 C A); (392 9358746 T C); (393
9359091 T G); (394 9359262 CA C); (395 9359423 A G); (396 9359564 C A); (397 9360107 T C); (398
9360188 A C); (399 9360295 C T); (400 9360391 C G); (401 9360596 C T); (402 9360747 C CT); (403
9360963 T A); (404 9361086 G A); (405 9361165 G A); (406 9361743 A C); (407 9362193 T C); (408
9362836 T C); (409 9363196 G A); (410 9363541 T G); (411 9364338 A G); (412 9364393 G T); (413
9364530 G A); (414 9364690 C T); (415 9364714 A T); (416 9364728 TGA T); (417 9364946 AT A); (418
9365048 C G); (419 9365069 T C); (420 9365105 A G); (421 9365170 C T); (422 9365282 C T); (423
9365422 T C); (424 9365761 A C); (425 9366289 G C); (426 9366787 G T); (427 9366839 T G); (428
9367003 G A); (429 9367058 A T); (430 9367611 AAAG A); (431 9367667 A T); (432 9367714 A T); (433
9369144 G T); (434 9369165 C A); (435 9369460 A C); (436 9369605 G A); (437 9370187 G C); (438
9370749 G A); (439 9370846 T A); (440 9370861 G A); (441 9371177 G A); (442 9371196 A G); (443
9371417 G T); (444 9371716 A G); (445 9371982 C A); (446 9372737 T G); (447 9373077 T C); (448
9373180 C T); (449 9373436 C T); (450 9374000 G A); (451 9374011 C T); (452 9374275 G A); (453
9374490 T C); (454 9374546 C T); (455 9374876 G A); (456 9374965 C T); (457 9375188 A G); (458
9375650 C T); (459 9376035 G A); (460 9376099 G A); (461 9376111 T C); (462 9376116 A G); (463
9376317 G A); (464 9376326 G A); (465 9376391 A G); (466 9377202 A G); (467 9378653 G A); (468
9378687 A G); (469 9378758 C T); (470 9378819 T C); (471 9378851 T C); (472 9378877 T C); (473
9378939 T C); (474 9379081 C T); (475 9379184 G A); (476 9379317 G A); (477 9379399 G A); (478
9379407 T C); (479 9379438 A G); (480 9379445 A G); (481 9379474 G T); (482 9379975 A G); (483
9380134 C T); (484 9380216 T C); (485 9380272 G A); (486 9380686 T C); (487 9381727 C T); (488
9381867 C T); (489 9381873 C T); (490 9381933 G A); (491 9382008 C T); (492 9382644 T C); (493
9382645 G A); (494 9382891 G T); (495 9382962 T C); (496 9383009 T C); (497 9383038 G A); (498
9383658 T G); (499 9383684 G A); (500 9383718 A T); (501 9383897 A T); (502 9383967 T G); (503
9384157 C T); (504 9384207 C T); (505 9384432 C T); (506 9385042 G A); (507 9385084 G A); (508
9385174 A G); (509 9385394 A G); (510 9385471 A G); (511 9385567 C T); (512 9385680 A G); (513
9386314 C A); (514 9386338 G T); (515 9386356 C T); (516 9386599 C T); (517 9388241 C T); (518
9388836 G GA); (519 9389115 G A); (520 9389584 G C); (521 9389646 C G); (522 9389753 T C); (523
9390011 C T); (524 9390035 T C); (525 9390233 T C); (526 9390454 G T); (527 9390522 T C); (528
9390578 G A); (529 9390643 T C); (530 9390826 C T); (531 9390965 A T); (532 9391244 T C); (533
9391287 C A); (534 9391414 A G); (535 9391671 G A); (536 9393285 G A); (537 9393297 A C); (538
9393426 C A); (539 9393551 T C); (540 9393559 G A); (541 9393628 G C); (542 9394563 A T); (543
9394624 A G); (544 9394954 A T); (545 9395187 C G); (546 9395688 G C); (547 9395755 T TA); (548
9396073 C T); (549 9396365 T C); (550 9396508 G T); (551 9396674 A T); (552 9396715 T C); (553
9397259 AAT A); (554 9397311 T A); (555 9397514 A G); (556 9397734 C A); (557 9398486 GA G); (558
9399145 G GA); (559 9399295 G A); (560 9399316 G A); (561 9399522 A G); (562 9400266 C A); (563
9400291 T A); (564 9400974 G A); (565 9401122 A T); (566 9401154 A G); (567 9401170 T
TTAATTAAAAAAACA); (568 9401282 T C); (569 9401457 C T); (570 9401508 C T); (571 9401600 A G); (572
9402229 C A); (573 9402238 G C); (574 9402255 C T); (575 9402833 T C); (576 9402872 G T); (577
9402998 G A); (578 9403120 T C); (579 9403622 A T); (580 9403658 G A); (581 9403684 T A); (582
9403729 G A); (583 9403741 C T); (584 9403825 G A); (585 9404146 A AGG); (586 9404163 G A); (587
9404375 T G); (588 9404395 G T); (589 9404448 G A); (590 9404713 G A); (591 9404743 C T); (592
9404759 G A); (593 9405051 T C); (594 9405081 C T); (595 9405407 G A); (596 9405413 C T); (597
9405419 A G); (598 9405421 A G); (599 9405764 G A); (600 9405780 GA G); (601 9405913 G C); (602
9406063 T C); (603 9406308 G A); (604 9406313 T C); (605 9406349 G A); (606 9406407 A G); (607
9406410 G A); (608 9406627 G A); (609 9406851 A G); (610 9406884 A G); (611 9406950 C T); (612
9406970 C T); (613 9407001 G A); (614 9407152 C T); (615 9407396 C T); (616 9407674 T G); (617
9407884 C T); (618 9407906 C T); (619 9407938 G A); (620 9408020 T A); (621 9408200 A G); (622
9408202 C T); (623 9408430 C T); (624 9408462 G C); (625 9409280 C T); (626 9409325 C CT); (627
9409347 A ATT); (628 9409378 G T); (629 9409400 A C); (630 9409403 C T); (631 9409411 T G); (632
9409708 T C); (633 9409766 T C); (634 9409991 G A); (635 9410020 T TA); (636 9410119 G A); (637
9410144 T C); (638 9410162 T A); (639 9410374 A G); (640 9410477 C T); (641 9410503 C G); (642
9410620 C T); (643 9410744 G A); (644 9410766 G A); (645 9410871 A G); (646 9410922 T C); (647
9411050 A G); (648 9411131 G A); (649 9411147 T C); (650 9411168 C A); (651 9411310 G A); (652
9411366 T C); (653 9411611 GA G); (654 9411830 TA T); (655 9412169 T A); (656 9412530 C T); (657
9412678 T A); (658 9413038 T C); (659 9413065 A G); (660 9413217 C T); (661 9413301 C A); (662
9413641 T C); (663 9413717 T C); (664 9413721 G A); (665 9414232 A G); (666 9414401 T C); (667
9414405 C T); (668 9414635 A G); (669 9414718 T C); (670 9414770 C T); (671 9414772 T C); (672
9414843 G A); (673 9415349 T C); (674 9415586 AAC A); (675 9415957 A G); (676 9416217 A G); (677
9416306 C G); (678 9416427 G A); (679 9416569 T C); (680 9416646 C T); (681 9416652 T C); (682
9416831 C A); (683 9416899 G C); (684 9416938 C T); (685 9417010 T C); (686 9417012 A G); (687
9417354 C T); (688 9417425 A G); (689 9417432 G A); (690 9418114 C T); (691 9418437 T C); (692
9418652 T C); (693 9419617 C T); (694 9419973 C T); (695 9420977 T A); (696 9421184 A G); (697
9421479 T C); (698 9421848 A G); (699 9421874 G A); (700 9421885 A C); (701 9421914 C T); (702
9422117 G A); (703 9422315 C T); (704 9422905 T C); (705 9422971 A G); (706 9423460 G A); (707
9423581 C G); (708 9423680 T G); (709 9424406 G A); (710 9424450 G A); (711 9424653 G A); (712
9424696 T G); (713 9424926 A T); (714 9425320 C T); (715 9425521 A G); (716 9425554 T C); (717
9425717 C T); (718 9425919 A G); (719 9425992 A G); (720 9426653 G A); (721 9426759 T C); (722
9427891 C T); (723 9427922 G A); (724 9427964 A G); (725 9428165 C A); (726 9428435 G A); (727
9428486 G T); (728 9428895 G A); (729 9428899 A G); (730 9429022 G A); (731 9429404 T G); (732
9429421 A G); (733 9429428 A G); (734 9429449 G A); (735 9429524 G A); (736 9429532 T C); (737
9429648 GTT G); (738 9429684 A G); (739 9429801 A AT); (740 9429883 T G); (741 9430012 G A); (742
9430118 C T); (743 9430119 A G); (744 9430468 C T); (745 9430514 C T); (746 9430589 C T); (747
9430776 C CT); (748 9430982 C G); (749 9431302 C T); (750 9431424 T A); (751 9431483 G A); (752
9431576 T C); (753 9432437 C G); (754 9432583 C G); (755 9432691 G A); (756 9432824 A AT); (757
9433535 C T); (758 9433664 G C); (759 9433809 T G); (760 9434341 A T); (761 9434558 T C); (762
9434653 C T); (763 9435162 C A); (764 9435398 A C); (765 9435450 T C); (766 9435461 T C); (767
9435753 A C); (768 9435767 T C); (769 9435821 C A); (770 9436059 T C); (771 9436160 A G); (772
9436307 T C); (773 9436802 C A); (774 9436930 C T); (775 9437053 C T); (776 9437153 G A); (777
9437246 G T); (778 9437284 T C); (779 9437421 C T); (780 9437441 G A); (781 9437442 C T); (782
9437510 G A); (783 9437525 A G); (784 9437557 C T); (785 9437697 A G); (786 9437852 C A); (787
9437870 C G); (788 9438099 TAGTTA T); (789 9438352 T C); (790 9438524 T C); (791 9438544 T C); (792
9439324 C G); (793 9439365 C T); (794 9439462 A G); (795 9439484 C G); (796 9440833 C G); (797
9440984 T C); (798 9440986 A G); (799 9441004 T C); (800 9441028 G C); (801 9441763 C T); (802
9442039 C T); (803 9442502 C T); (804 9442508 C T); (805 9442860 A T); (806 9442951 A G); (807
9443455 C A); (808 9443658 C T); (809 9444001 A G); (810 9444274 T C); (811 9445091 T G); (812
9445345 T C); (813 9445355 T C); (814 9445487 G A); (815 9445549 A G); (816 9446029 C A); (817
9446263 A C); (818 9446475 A T); (819 9446853 C T); (820 9446962 A G); (821 9447166 G C); (822
9447698 T C); (823 9447780 G A); (824 9448177 G A); (825 9448860 A T); (826 9449685 G T); (827
9450229 C T); (828 9451200 A G); (829 9451778 A C); (830 9452256 T TA); (831 9452390 A AT); (832
9452438 C T); (833 9452656 A AT); (834 9452719 T A); (835 9452807 T C); (836 9453097 A C); (837
9453275 G A); (838 9453294 T TA); (839 9453483 A G); (840 9453515 G A); (841 9453625 T C); (842
9453709 A G); (843 9453717 A G); (844 9454102 T C); (845 9454213 T C); (846 9454229 C T); (847
9454260 GA G); (848 9454295 G A); (849 9454312 T C); (850 9454326 GAATA G); (851 9454404 G A); (852
9454480 C T); (853 9454881 T G); (854 9454957 A G); (855 9454969 C T); (856 9455688 A G); (857
9455691 G A); (858 9455768 A C); (859 9455888 C T); (860 9456022 A T); (861 9456039 G A); (862
9456118 A T); (863 9456440 T C); (864 9456494 C A); (865 9456649 T G); (866 9456784 C T); (867
9457300 G A); (868 9457670 A C); (869 9457694 A C); (870 9457768 A T); (871 9457797 G A); (872
9457930 T G); (873 9457941 T C); (874 9458010 C T); (875 9458026 T C); (876 9458076 C T); (877
9458100 C CT); (878 9458177 G GGT); (879 9458216 T C); (880 9458217 A G); (881 9458322 C T); (882
9458440 G A); (883 9458792 G A); (884 9458826 T C); (885 9458827 C T); (886 9458864 G A); (887
9458868 C T); (888 9458872 T C); (889 9458895 C T); (890 9458897 T C); (891 9458908 C T); (892
9458926 T G); (893 9458953 T A); (894 9459175 T C); (895 9459191 C T); (896 9460328 C G); (897
9460416 A T); (898 9460654 A G); (899 9460785 A G); (900 9460840 G GCTGGGAATACTTTTTTT); (901
9461200 A T); (902 9461359 G A); (903 9461476 C T); (904 9461662 T A); (905 9462843 G GA); (906
9463111 T C); (907 9463724 G A); (908 9463725 T A); (909 9464187 CA C); (910 9464908 C T); (911
9465067 G GT); (912 9465073 A G); (913 9465130 G GA); (914 9465475 G C); (915 9465923 C T); (916
9466002 A G); (917 9466025 C T); (918 9466156 A C); (919 9466214 A G); (920 9466677 G T); (921
9467246 G A); (922 9467267 A T); (923 9467469 TA T); (924 9467791 A C); (925 9468047 T A); (926
9468288 G A); (927 9468290 G A); (928 9468292 G A); (929 9468294 G A); (930 9468296 G A); (931
9468298 G A); (932 9468326 A G); (933 9468332 A G); (934 9468472 C T); (935 9468538 G A); (936
9468690 A G); (937 9468751 C G); (938 9468766 A G); (939 9468776 C T); (940 9469027 T A); (941
9469599 C A); (942 9469752 GAT G); (943 9469788 C A); (944 9470182 G A); (945 9470605 T G); (946
9470702 C T); (947 9470724 A G); (948 9470740 T C); (949 9470754 A G); (950 9470763 C T); (951
9470794 G C); (952 9470804 C T); (953 9471060 T C); (954 9471073 G C); (955 9471199 C G); (956
9471261 A G); (957 9471377 C G); (958 9471460 T G); (959 9471556 G T); (960 9471911 C G); (961
9471990 C G); (962 9472128 A C); (963 9473195 C CA); (964 9473201 T G); (965 9473264 G C); (966
9473307 C T); (967 9473336 A G); (968 9473370 A G); (969 9473409 T C); (970 9473432 T A); (971
9473450 G A); (972 9473600 A G); (973 9473667 A G); (974 9474043 C T); (975 9474105 A T); (976
9474878 G C); (977 9474985 T C); (978 9475083 A G); (979 9475116 C T); (980 9475674 G T); (981
9475798 A AT); (982 9476065 G A); (983 9476151 G A); (984 9476444 G A); (985 9476886 G A); (986
9476893 T C); (987 9476963 C T); (988 9477262 G A); (989 9477462 G A); (990 9477821 C T); (991
9477936 C T); (992 9478024 T G); (993 9478191 C T); (994 9478379 G A); (995 9478393 A G); (996
9478465 G T); (997 9478480 G A); (998 9478550 G A); (999 9478599 A G); (1000 9478776 T C); (1001
9478938 GA G); (1002 9479507 C T); (1003 9479765 G A); (1004 9479834 C T); (1005 9480013 C A); (1006
9480027 C T); (1007 9480171 C T); (1008 9480229 G A); (1009 9480394 G A); (1010 9480558 C
CAT); (1011 9481238 A C); (1012 9481265 G A); (1013 9481669 C T); (1014 9481717 C T); (1015 9481748
A G); (1016 9481789 C G); (1017 9481809 C T); (1018 9482008 G A); (1019 9482170 T C); (1020 9482174
C T); (1021 9482276 T C); (1022 9482465 G A); (1023 9483063 T C); (1024 9483106 C T); (1025 9483109 C
G); (1026 9483127 T C); (1027 9483206 T C); (1028 9483237 A G); (1029 9483288 A AG); (1030 9483298
G A); (1031 9483431 T C); (1032 9483497 C T); (1033 9483574 T C); (1034 9483831 C T); (1035 9483837 C
T); (1036 9483915 C T); (1037 9484496 G A); (1038 9484498 C T); (1039 9484568 C A); (1040 9484610 G
T); (1041 9484738 G A); (1042 9484752 G A); (1043 9484936 A G); (1044 9484954 C T); (1045 9484991 T
C); (1046 9485422 CTT C); (1047 9485469 G A); (1048 9485523 C A); (1049 9485539 A G); (1050 9485579
T C); (1051 9485689 C T); (1052 9485853 T A); (1053 9486124 G A); (1054 9486180 A G); (1055 9486391
A G); (1056 9486394 A G); (1057 9486513 C T); (1058 9486515 C T); (1059 9486535 C
CATATATATATATATAT); (1060 9486586 A T); (1061 9486593 T A); (1062 9486648 C CAT); (1063 9486700
T C); (1064 9486735 T TGGATAACTAGAA); (1065 9486785 T C); (1066 9487413 C T); (1067 9487474 A
T); (1068 9487566 T A); (1069 9487683 A G); (1070 9487759 G A); (1071 9487777 A AAACCAGTT); (1072
9487884 G A); (1073 9488114 T A); (1074 9488203 C T); (1075 9488210 C G); (1076 9488232 C T); (1077
9488248 G A); (1078 9488283 G A); (1079 9488452 G A); (1080 9488495 T C); (1081 9488587 T C); (1082
9488616 G A); (1083 9488678 C T); (1084 9488873 C G); (1085 9488893 A G); (1086 9489041 A G); (1087
9489077 A T); (1088 9489144 C G); (1089 9489275 A G); (1090 9489301 G A); (1091 9489515 A G); (1092
9489535 A G); (1093 9490274 A G); (1094 9490687 T C); (1095 9491264 T C); (1096 9491304 C T); (1097
9491446 C T); (1098 9491495 T C); (1099 9491887 G A); (1100 9492012 A G); (1101 9492034 C T); (1102
9492089 A C); (1103 9492103 G A); (1104 9492316 T C); (1105 9492403 G A); (1106 9492610 G A); (1107
9492727 A G); (1108 9492949 GT G); (1109 9492962 G A); (1110 9493014 A T); (1111 9493447 C
T); (1112 9493477 G C); (1113 9493610 AAAG A); (1114 9493660 T C); (1115 9493754 T TATA); (1116
9493899 G C); (1117 9493953 C T); (1118 9493970 T C); (1119 9495556 T G); (1120 9495789 G A); (1121
9496822 T C); (1122 9496834 C A); (1123 9497339 A T); (1124 9497345 C T); (1125 9497459 C T); (1126
9497670 T C); (1127 9497771 C T); (1128 9498193 A G); (1129 9498199 G A); (1130 9498291 C T); (1131
9498377 A C); (1132 9498551 A T); (1133 9498613 C A); (1134 9498665 A C); (1135 9498693 A
AAAATTC); (1136 9498699 T G); (1137 9498700 T A); (1138 9498762 G A); (1139 9498766 G A); (1140
9498769 C T); (1141 9498779 T C); (1142 9498809 G A); (1143 9498811 A G); (1144 9498878 T C); (1145
9498927 A G); (1146 9499155 C T); (1147 9499438 G C); (1148 9500102 C A); (1149 9500312 T C); (1150
9501828 C T); (1151 9502018 T C); (1152 9502027 A G); (1153 9502088 T C); (1154 9502837 A C); (1155
9502845 A G); (1156 9503198 A T); (1157 9503199 A G); (1158 9503453 T C); (1159 9503766 A G); (1160
9503776 A G); (1161 9503842 T C); (1162 9503850 T C); (1163 9503917 A G); (1164 9504014 G A); (1165
9504037 G A); (1166 9504099 A G); (1167 9504104 G T); (1168 9504182 T C); (1169 9504194 C T); (1170
9504221 T C); (1171 9504299 C T); (1172 9504304 A G); (1173 9504375 A T); (1174 9504424 C T); (1175
9504436 A G); (1176 9504444 C T); (1177 9504498 A G); (1178 9504499 C T); (1179 9504586 A G); (1180
9504600 C T); (1181 9504695 T C); (1182 9504807 C A); (1183 9505048 A G); (1184 9505115 G
GAA); (1185 9505179 T C); (1186 9505366 C T); (1187 9505560 C T); (1188 9505789 C T); (1189 9505820
A T); (1190 9506143 C T); (1191 9506539 C T); (1192 9506789 A G); (1193 9506983 G A); (1194 9507135
C T); (1195 9507228 C A); (1196 9507985 A G); (1197 9507996 A C); (1198 9508018 C G); (1199 9508045
C T); (1200 9508063 G T); (1201 9508214 T C); (1202 9508355 A G); (1203 9508413 G A); (1204 9508647
G A); (1205 9508675 C A); (1206 9508676 C A); (1207 9508703 T C); (1208 9508748 T C); (1209 9508761
A G); (1210 9508814 G A); (1211 9508950 A AT); (1212 9508956 G A); (1213 9508990 G A); (1214
9509040 C G); (1215 9509041 T C); (1216 9509251 G A); (1217 9509257 G C); (1218 9509309 A
AC); (1219 9509974 A G); (1220 9510072 T C); (1221 9510170 A C); (1222 9510228 T C); (1223 9510259 T
C); (1224 9511307 A G); (1225 9511388 C T); (1226 9511499 C T); (1227 9511699 G A); (1228 9511710 A
G); (1229 9511735 T C); (1230 9511819 G GCGGTA); (1231 9511931 G T); (1232 9511935 C T); (1233
9512066 A G); (1234 9512088 T C); (1235 9512155 A G); (1236 9512190 T C); (1237 9512201 C T); (1238
9512346 G A); (1239 9512394 C T); (1240 9513054 A G); (1241 9513098 A C); (1242 9513099 T A); (1243
9513102 G T); (1244 9513103 T G); (1245 9513288 TAAG T); (1246 9514033 C CT); (1247 9514398 A
G); (1248 9514458 CTT C); (1249 9514698 A AT); (1250 9514729 T G); (1251 9514960 G A); (1252
9514961 A G); (1253 9514964 T A); (1254 9514965 A T); (1255 9514967 T A); (1256 9515964 G C); (1257
9516118 A C); (1258 9517218 G C); (1259 9518352 T C); (1260 9518782 A C); (1261 9518814 G T); (1262
9518901 G A); (1263 9518911 G A); (1264 9519142 C T); (1265 9519974 T G); (1266 9520537 C T); (1267
9520548 C T); (1268 9520622 G A); (1269 9520716 T C); (1270 9520831 C T); (1271 9520998 G A); (1272
9523230 A C); (1273 9525197 TTATATA T); (1274 9525277 T A); (1275 9525623 C T); (1276 9526027 C
G); (1277 9526860 T C); (1278 9526915 A G); (1279 9526978 T C); (1280 9526996 A G); (1281 9526998 G
T); (1282 9527037 C T); (1283 9527171 G A); (1284 9527386 A C); (1285 9527707 T C); (1286 9527945 T
C); (1287 9528150 T C); (1288 9528154 G A); (1289 9528433 G C); (1290 9528505 G A); (1291 9528549 C
T); (1292 9528569 C T); (1293 9528617 G A); (1294 9528977 T C); (1295 9529022 C T); (1296 9529190 G
A); (1297 9529288 C T); (1298 9531362 G A); (1299 9531521 C G); (1300 9531589 A G); (1301 9532233
AT A); (1302 9532520 C CATAT); (1303 9533329 A T); (1304 9533441 C A); (1305 9534097 A T); (1306
9534241 C G); (1307 9534463 TG T); (1308 9535274 G GA); (1309 9535309 G A); (1310 9535436 C
G); (1311 9535582 C A); (1312 9535652 C T); (1313 9535660 G A); (1314 9535719 C T); (1315 9535798 T
C); (1316 9536221 C T); (1317 9536360 C T); (1318 9536367 A G); (1319 9536511 C T); (1320 9536648 A
T); (1321 9536863 G A); (1322 9537084 A G); (1323 9537281 A T); (1324 9537334 T C); (1325 9537345 G
A); (1326 9537442 T G); (1327 9538176 A T); (1328 9538292 C T); (1329 9538639 G A); (1330 9538645 C
T); (1331 9538715 C T); (1332 9538718 G A); (1333 9538744 G A); (1334 9538774 C A); (1335 9538923 A
G); (1336 9538950 T C); (1337 9538968 G A); (1338 9538980 C CTGTTAT); (1339 9538991 C T); (1340
9538992 C T); (1341 9539051 C T); (1342 9539063 G A); (1343 9539074 C T); (1344 9539097 T A); (1345
9539114 C G); (1346 9539115 T C); (1347 9544888 TCTTCTCCGGCGC T); (1348 9544891 T C); (1349
9544895 T C); (1350 9544929 C T); (1351 9544970 C G); (1352 9545002 G A); (1353 9545005 C T); (1354
9546595 AT A); (1355 9548626 TA T); (1356 9548753 T A); (1357 9548754 T A); (1358 9550143 T
C); (1359 9550298 G GT); (1360 9551455 G C); (1361 9551798 C T); (1362 9554823 T A); (1363 9556253 G
A); (1364 9556385 A T); (1365 9556386 C A); (1366 9556387 A T); (1367 9558434 G A); (1368 9559782 C
T); (1369 9560469 C T); (1370 9562241 G T); (1371 9562375 G A); (1372 9562572 AG A); (1373 9563011 C
T); (1374 9563060 C A); (1375 9563143 G A); (1376 9563696 C T); (1377 9565117 G A); (1378 9565539 C
CA); (1379 9565607 G A); (1380 9565743 C T); (1381 9570557 A T); (1382 9570604 A G); (1383 9571083 C
T); (1384 9571204 C T); (1385 9571338 G A); (1386 9571373 T C); (1387 9571381 C A); (1388 9571391 A
G); (1389 9572908 TTTCTTCCTAC T); (1390 9576136 G A); (1391 9576140 C A); (1392 9576141 T C); (1393
9576183 A T); (1394 9576192 C T); (1395 9576236 C CA); (1396 9576279 C T); (1397 9576355 A T); (1398
9576420 G A); (1399 9576479 C T); (1400 9576758 G A); (1401 9576894 C T); (1402 9577147 G A); (1403
9577219 A T); (1404 9578749 C T); (1405 9578841 G A); (1406 9578892 C T); (1407 9578908 T G); (1408
9578966 G A); (1409 9583392 T A); (1410 9584080 T A); (1411 9584596 G A); (1412 9584994 G T); (1413
9585677 T TTA); (1414 9585956 C T); (1415 9586568 G A); (1416 9587369 G A); (1417 9587448 G
A); (1418 9587872 G A); (1419 9587881 C T); (1420 9588310 T G); (1421 9588543 T C); (1422 9588861 A
C); (1423 9589152 G GA); (1424 9590402 A C); (1425 9594279 C G); (1426 9596514 G A); (1427 9596676
G A); (1428 9597148 T G); (1429 9605988 G C); (1430 9607748 C T); (1431 9607813 A C); (1432 9608272
T A); (1433 9608382 A C); (1434 9608414 T C); (1435 9608525 C T); (1436 9608997 C G); (1437 9609015 C
T); (1438 9609276 C A); (1439 9609318 C G); (1440 9609572 C T); (1441 9609606 CATGAT C); (1442
9610804 G A); (1443 9611360 C A); (1444 9611414 G T); (1445 9611483 G A); (1446 9612311 C T); (1447
9612505 G A); (1448 9612635 C T); (1449 9612678 G A); (1450 9612707 G A); (1451 9614094 A
AT); (1452 9614815 A C); (1453 9615257 T C); (1454 9615292 A T); (1455 9615734 A C); (1456 9616858 A
AT); (1457 9617712 C A); (1458 9618036 T A); (1459 9618346 T C); (1460 9618390 AT A); (1461 9618625
A C); (1462 9618803 A T); (1463 9619001 A C); (1464 9620803 A C); (1465 9621209 G A); (1466 9621982
A G); (1467 9622088 A G); (1468 9622760 T G); (1469 9622986 G T); (1470 9623977 G A); (1471 9623997
C T); (1472 9624189 C T); (1473 9624824 G GA); (1474 9625058 C T); (1475 9625308 G A); (1476 9626222
T C); (1477 9626537 C A); (1478 9626627 G A); (1479 9626656 A T); (1480 9626876 A G); (1481 9626928
G T); (1482 9627665 C T); (1483 9627697 A G); (1484 9627976 G A); (1485 9628295 C G); (1486 9628491
C T); (1487 9628493 C T); (1488 9628498 G A); (1489 9628640 A C); (1490 9628810 T C); (1491 9628819 C
T); (1492 9628865 A G); (1493 9628909 C CT); (1494 9628934 A G); (1495 9628959 A C); (1496 9629112 T
A); (1497 9629269 G A); (1498 9629575 G A); (1499 9629700 C T); (1500 9629704 C A); (1501 9629739 C
T); (1502 9629748 C T); (1503 9629875 A G); (1504 9630045 C A); (1505 9630353 A G); (1506 9630783 C
T); (1507 9630882 T G); (1508 9631000 C T); (1509 9631068 G A); (1510 9631091 C T); (1511 9631397 A
G); (1512 9631496 G A); (1513 9631808 C T); (1514 9631836 G A); (1515 9631952 A G); (1516 9632140 T
C); (1517 9632186 G A); (1518 9632720 A G); (1519 9632866 C T); (1520 9632882 C T); (1521 9632897 T
C); (1522 9632962 A G); (1523 9632976 T C); (1524 9633027 G T); (1525 9634720 T C); (1526 9634806 G
C); (1527 9634825 A G); (1528 9634983 C T); (1529 9635321 G A); (1530 9635376 A G); (1531 9635427 A
G); (1532 9635577 T C); (1533 9635632 T C); (1534 9635658 G C); (1535 9635819 A G); (1536 9635966 C
T); (1537 9636210 T C); (1538 9636314 A G); (1539 9636357 G A); (1540 9636428 A G); (1541 9636457 T
C); (1542 9636976 A G); (1543 9637145 T C); (1544 9637171 A C); (1545 9637522 T C); (1546 9637591 A
G); (1547 9637628 G A); (1548 9637674 C T); (1549 9638002 C T); (1550 9638018 C T); (1551 9638086 G
A); (1552 9638092 A C); (1553 9638169 C T); (1554 9638171 G C); (1555 9638242 T C); (1556 9638274 A
AG); (1557 9638462 C T); (1558 9638526 C T); (1559 9638637 C T); (1560 9638710 G A); (1561 9638774 T
C); (1562 9639378 C T); (1563 9639525 T G); (1564 9640834 G A); (1565 9641144 A G); (1566 9641357 T
TTTA); (1567 9642630 G T); (1568 9643058 G A); (1569 9643942 A G); (1570 9643945 G A); (1571
9643993 A G); (1572 9644031 C T); (1573 9644046 C T); (1574 9644067 C T); (1575 9644651 T C); (1576
9644725 A T); (1577 9645020 A G); (1578 9645278 T TA); (1579 9645337 T C); (1580 9645440 G A); (1581
9645471 C T); (1582 9646011 C A); (1583 9646102 G C); (1584 9646346 A G); (1585 9646612 G C); (1586
9647217 T C); (1587 9647412 G A); (1588 9647617 T A); (1589 9647943 A G); (1590 9648336 T A); (1591
9648715 T TA); (1592 9648754 G A); (1593 9649050 T A); (1594 9649234 T C); (1595 9649501 G A); (1596
9649570 T C); (1597 9649641 C T); (1598 9649750 T G); (1599 9649928 A C); (1600 9650449 A T); (1601
9650492 A G); (1602 9650977 A AC); (1603 9651899 T C); (1604 9652280 A G); (1605 9652575 T C); (1606
9652805 A G); (1607 9652865 A C); (1608 9652915 G A); (1609 9652951 A G); (1610 9652957 C T); (1611
9653130 T C); (1612 9653152 G A); (1613 9653440 C T); (1614 9654318 C T); (1615 9654524 A G); (1616
9654552 G A); (1617 9654576 C A); (1618 9654687 G A); (1619 9655793 C T); (1620 9656007 G A); (1621
9656338 A G); (1622 9656363 A C); (1623 9656508 T TG); (1624 9656511 C T); (1625 9656730 G A); (1626
9656796 C T); (1627 9656808 A G); (1628 9656826 T C); (1629 9657055 T C); (1630 9657227 A C); (1631
9657451 G A); (1632 9657916 A G); (1633 9658690 T C); (1634 9658695 G A); (1635 9658723 C T); (1636
9658776 A G); (1637 9658952 A G); (1638 9660024 G A); (1639 9660225 G A); (1640 9661058 G A); (1641
9661093 C CACTTCCCTCCTTTAAA); (1642 9661176 C A); (1643 9661419 G A); (1644 9661567 T G); (1645
9661592 G A); (1646 9661881 AAAG A); (1647 9662044 GA G); (1648 9662204 CAT C); (1649 9662363 T
A); (1650 9662528 C A); (1651 9662716 AT A); (1652 9663388 G A); (1653 9663392 T C); (1654 9663603 G
A); (1655 9663689 A G); (1656 9663725 C T); (1657 9663791 C T); (1658 9663805 A T); (1659 9663827 G
A); (1660 9663997 A C); (1661 9664928 A G); (1662 9664942 A G); (1663 9664993 T C); (1664 9665149 C
T); (1665 9665175 T C); (1666 9665451 G T); (1667 9665464 G A); (1668 9665521 C T); (1669 9665564 A
G); (1670 9665721 G A); (1671 9665737 A G); (1672 9665773 T G); (1673 9665779 G A); (1674 9665790 C
T); (1675 9665870 C T); (1676 9665879 A G); (1677 9665971 A T); (1678 9666010 C A); (1679 9666017 G
A); (1680 9666175 A G); (1681 9666189 T C); (1682 9666251 G GGGTGGCGCCAGTTGTGGCGCT); (1683
9666253 A G); (1684 9666261 A C); (1685 9666462 G A); (1686 9666570 C A); (1687 9666676 A G); (1688
9666685 G T); (1689 9666687 A G); (1690 9666718 A G); (1691 9666894 A G); (1692 9667039 G A); (1693
9667041 G T); (1694 9668015 C G); (1695 9668290 G A); (1696 9668292 G A); (1697 9668478 T C); (1698
9668613 G GA); (1699 9668782 T C); (1700 9668833 G A); (1701 9668958 C A); (1702 9668961 A
G); (1703 9669128 G A); (1704 9669150 T C); (1705 9669413 C T); (1706 9669454 T C); (1707 9669494 C
T); (1708 9669512 C G); (1709 9669532 T C); (1710 9669740 T A); (1711 9669814 T C); (1712 9669815 G
T); (1713 9670067 G A); (1714 9670082 G A); (1715 9670088 C T); (1716 9670135 A G); (1717 9670153 G
A); (1718 9670162 G A); (1719 9670232 A G); (1720 9670240 C T); (1721 9670257 G A); (1722 9670259 T
C); (1723 9670393 C G); (1724 9670413 A G); (1725 9670846 G A); (1726 9671110 T C); (1727 9671206 T
C); (1728 9671360 G A); (1729 9671477 G A); (1730 9671511 G A); (1731 9671835 A G); (1732 9671841
GA G); (1733 9671901 G A); (1734 9671924 A C); (1735 9672161 G A); (1736 9672845 T C); (1737
9672856 G A); (1738 9673574 G A); (1739 9673771 A G); (1740 9673983 C G); (1741 9674663 T C); (1742
9674676 T C); (1743 9674688 T C); (1744 9674710 A C); (1745 9675203 A ATGTG); (1746 9675415 G
T); (1747 9675474 A C); (1748 9675475 T A); (1749 9675481 ATT A); (1750 9675490 G A); (1751 9675744
A G); (1752 9675967 T C); (1753 9676084 G C); (1754 9676091 T C); (1755 9676152 A T); (1756 9676598 T
A); (1757 9676857 T G); (1758 9677609 C A); (1759 9677862 C T); (1760 9678021 C T); (1761 9678283 T
C); (1762 9678536 T A); (1763 9678799 A T); (1764 9679098 G A); (1765 9679182 G A); (1766 9679273 G
T); (1767 9679291 A C); (1768 9679389 G A); (1769 9679955 G A); (1770 9680000 CT C); (1771 9680224 A
C); (1772 9680244 G A); (1773 9680837 A G); (1774 9680868 G T); (1775 9680869 G T); (1776 9680894 C
T); (1777 9681251 C T); (1778 9681361 C T); (1779 9681715 A C); (1780 9681769 T G); (1781 9681963 A
C); (1782 9682235 G A); (1783 9682407 A G); (1784 9682433 T C); (1785 9682467 A G); (1786 9682552 C
T); (1787 9682841 T A); (1788 9682870 T C); (1789 9682904 G A); (1790 9682932 T C); (1791 9683157 A
G); (1792 9683185 T C); (1793 9683531 G A); (1794 9683588 A G); (1795 9683759 C A); (1796 9683867 T
C); (1797 9683899 A G); (1798 9684151 G A); (1799 9684248 C A); (1800 9684251 G T); (1801 9684440 C
G); (1802 9684475 C A); (1803 9684663 A C); (1804 9684934 G A); (1805 9685182 A C); (1806 9685417 T
C); (1807 9685531 C T); (1808 9685577 G A); (1809 9685890 A C); (1810 9685933 T C); (1811 9686034 C
G); (1812 9686045 G A); (1813 9686219 G A); (1814 9686220 A G); (1815 9686342 G A); (1816 9686343 A
G); (1817 9686712 C T); (1818 9686860 T G); (1819 9686964 T C); (1820 9687026 T C); (1821 9687048 G
T); (1822 9687457 G A); (1823 9687937 C G); (1824 9688071 C A); (1825 9688241 T C); (1826 9688244 T
C); (1827 9688267 G C); (1828 9688420 A G); (1829 9689086 G A); (1830 9689208 T C); (1831 9689304 A
T); (1832 9689472 G A); (1833 9689504 G C); (1834 9689663 C T); (1835 9689804 G A); (1836 9689931 G
A); (1837 9690056 C T); (1838 9690264 T TA); (1839 9690265 G A); (1840 9690562 A C); (1841 9690591 T
C); (1842 9690794 C T); (1843 9690934 T C); (1844 9690979 G A); (1845 9690987 G A); (1846 9690989 T
C); (1847 9691103 G A); (1848 9691394 A G); (1849 9691837 A G); (1850 9691882 T C); (1851 9691914 A
G); (1852 9692003 G A); (1853 9692143 A G); (1854 9692416 C CG); (1855 9692442 T G); (1856 9692454
A G); (1857 9692739 G A); (1858 9692790 G A); (1859 9692810 G A); (1860 9693019 A G); (1861 9693056
T C); (1862 9693337 G A); (1863 9693387 A G); (1864 9693518 C T); (1865 9693545 G A); (1866 9693587
T G); (1867 9693598 T C); (1868 9694127 G C); (1869 9694166 C T); (1870 9694258 G A); (1871 9694288
G GACA); (1872 9694515 G GTTATAATTATTTA); (1873 9694526 G T); (1874 9694749 G A); (1875 9694884
C T); (1876 9694969 C T); (1877 9695114 G T); (1878 9695117 G A); (1879 9695162 G A); (1880 9695420
A T); (1881 9695444 G A); (1882 9695481 C A); (1883 9695820 A G); (1884 9696130 G A); (1885 9696193
C A); (1886 9696239 T C); (1887 9696287 A T); (1888 9696735 A G); (1889 9697249 A C); (1890 9697500
C T); (1891 9697766 T A); (1892 9697980 G C); (1893 9698012 G A); (1894 9698030 C G); (1895 9698177
CA C); (1896 9699128 G T); (1897 9699181 G A); (1898 9699463 C T); (1899 9699503 G A); (1900 9699538
G A); (1901 9699891 G C); (1902 9700209 G A); (1903 9700450 C T); (1904 9700464 T A); (1905 9700637
T TTTCTTCTTCTTCTTCTTCTTCTTC); (1906 9700979 T G); (1907 9701043 T A); (1908 9701453 G C); (1909
9701797 T C); (1910 9702063 A G); (1911 9702105 A G); (1912 9702865 A G); (1913 9703225 A G); (1914
9703424 C G); (1915 9703480 A AAATCAG); (1916 9703502 T A); (1917 9703556 G A); (1918 9703591 G
C); (1919 9703622 A G); (1920 9703629 G T); (1921 9703634 G T); (1922 9704124 A T); (1923 9704202 T
C); (1924 9704281 T C); (1925 9704342 T C); (1926 9704510 A G); (1927 9704619 G A); (1928 9704782 A
G); (1929 9705733 A G); (1930 9706026 G GATTGCATAATAGAACTTTAAAAAACATAAA); (1931 9706142 G
T); (1932 9706178 T C); (1933 9706205 C T); (1934 9706210 C G); (1935 9706540 T A); (1936 9707093 A
G); (1937 9707196 A G); (1938 9707214 C T); (1939 9707307 A G); (1940 9707537 A C); (1941 9707618 A
T); (1942 9707688 T C); (1943 9707714 TA T); (1944 9707789 A G); (1945 9707865 C T); (1946 9708027 G
A); (1947 9708044 AG A); (1948 9708074 C T); (1949 9708304 A C); (1950 9708328 T C); (1951 9708365 A
G); (1952 9709156 C T); (1953 9709607 C A); (1954 9710169 T C); (1955 9710236 A C); (1956 9710249 C
A); (1957 9710294 T C); (1958 9710766 C T); (1959 9710868 AG A); (1960 9710906 C A); (1961 9710914 G
A); (1962 9710923 T C); (1963 9711037 A G); (1964 9711157 C A); (1965 9711428 A G); (1966 9711455 A
G); (1967 9711957 A T); (1968 9711964 C T); (1969 9711982 A G); (1970 9712039 A G); (1971 9712070 C
T); (1972 9712667 C T); (1973 9713457 G A); (1974 9713772 A G); (1975 9713832 A G); (1976 9714117 T
TTCACAACATGAAAATC); (1977 9714385 A G); (1978 9714759 T C); (1979 9714817 AG A); (1980 9714886
G A); (1981 9714941 T C); (1982 9715280 G GTT); (1983 9715318 G T); (1984 9715495 C T); (1985
9715738 CTG C); (1986 9715887 T G); (1987 9716140 T C); (1988 9716185 G T); (1989 9716302 G
A); (1990 9716629 A T); (1991 9716648 A C); (1992 9716804 A T); (1993 9717220 G A); (1994 9717531 A
G); (1995 9717985 A G); (1996 9718115 C T); (1997 9718207 C T); (1998 9718341 C G); (1999 9718429 G
C); (2000 9718670 G GA); (2001 9718749 G T); (2002 9718793 A AC); (2003 9719396 A G); (2004 9719704
G A); (2005 9719823 A G); (2006 9719971 A G); (2007 9720350 C G); (2008 9720394 C A); (2009 9720399
G A); (2010 9720897 T C); (2011 9721013 C T); (2012 9721044 G A); (2013 9721102 A G); (2014 9721291
C T); (2015 9721330 C T); (2016 9721412 T C); (2017 9721548 C T); (2018 9721558 A
AATGCAGAATCAATT); (2019 9721878 G A); (2020 9721941 A T); (2021 9722022 T A); (2022 9722116 G
A); (2023 9722172 T C); (2024 9722212 A G); (2025 9722421 T C); (2026 9722612 C T); (2027 9722637 C
T); (2028 9722829 T C); (2029 9722922 T C); (2030 9723286 T C); (2031 9723297 T C); (2032 9723595 A
G); (2033 9723599 G A); (2034 9723620 T G); (2035 9723986 C T); (2036 9724085 C T); (2037 9724086 G
C); (2038 9724142 AT A); (2039 9724371 T A); (2040 9724373 A T); (2041 9725330 G C); (2042 9725799 G
A); (2043 9725827 G A); (2044 9725893 T C); (2045 9726581 G A); (2046 9726723 G C); (2047 9726749
AATCAGAAAGTCGG A); (2048 9726765 C T); (2049 9726796 G A); (2050 9726799 T C); (2051 9727046 C
T); (2052 9727103 A G); (2053 9727111 G A); (2054 9727119 G A); (2055 9727136 GA G); (2056 9727225
C T); (2057 9727232 A T); (2058 9727237 C CT); (2059 9727284 A G); (2060 9727324 G A); (2061 9727356
T C); (2062 9727401 G A); (2063 9727500 C T); (2064 9727644 T G); (2065 9727864 A C); (2066 9727919
C T); (2067 9727991 C T); (2068 9728047 T G); (2069 9728253 A G); (2070 9728303 A G); (2071 9728333
G C); (2072 9728406 T C); (2073 9728420 T TTATATATATA); (2074 9728445 A G); (2075 9728600 G
A); (2076 9729120 T G); (2077 9729191 G C); (2078 9729397 A AT); (2079 9729465 A T); (2080 9729846 A
C); (2081 9729911 G A); (2082 9730519 C T); (2083 9730558 T TA); (2084 9730584 G A); (2085 9730600 C
T); (2086 9730622 G A); (2087 9730831 T C); (2088 9730916 C T); (2089 9731075 G A); (2090 9731123 A
T); (2091 9731277 A C); (2092 9731291 A G); (2093 9731420 G A); (2094 9731471 TA T); (2095 9731888
AT A); (2096 9732083 G GTT); (2097 9732299 C A); (2098 9732353 A G); (2099 9732354 C T); (2100
9732370 A G); (2101 9732441 C T); (2102 9732469 C A); (2103 9732662 A G); (2104 9732693 T C); (2105
9732758 A G); (2106 9732837 G A); (2107 9733040 C T); (2108 9733068 CA C); (2109 9733118 G
A); (2110 9733786 T C); (2111 9733942 T C); (2112 9734246 AT A); (2113 9734317 G A); (2114 9734740 C
A); (2115 9734878 A T); (2116 9735161 A T); (2117 9735371 A T); (2118 9735481 AT A); (2119 9735640 A
C); (2120 9735666 A T); (2121 9735679 T C); (2122 9735747 A T); (2123 9735998 C T); (2124 9736327 T
C); (2125 9736448 C A); (2126 9736512 C T); (2127 9736554 T C); (2128 9736605 C CA); (2129 9737293 T
C); (2130 9737319 A C); (2131 9737469 T C); (2132 9737497 A G); (2133 9737507 T C); (2134 9738139 T
A); (2135 9738631 G A); (2136 9738646 A C); (2137 9738748 G A); (2138 9738943 C A); (2139 9738975 C
T); (2140 9739706 A G); (2141 9739709 C T); (2142 9739734 T A); (2143 9739805 A G); (2144 9739807 T
G); (2145 9739942 T C); (2146 9739968 A G); (2147 9740019 G A); (2148 9740340 G A); (2149 9740857 G
C); (2150 9740919 C T); (2151 9740937 C T); (2152 9741194 A G); (2153 9741726 C T); (2154 9743143 A
G); (2155 9743316 G A); (2156 9744844 A G); (2157 9744955 C CTCACCTTGTTG); (2158 9744960 T
C); (2159 9744987 A C); (2160 9745001 A G); (2161 9745022 A T); (2162 9745495 A G); (2163 9745767 A
G); (2164 9745852 C T); (2165 9745869 T C); (2166 9745926 C A); (2167 9745985 C T); (2168 9746281 T
C); (2169 9746790 G A); (2170 9746825 G A); (2171 9746955 G A); (2172 9747149 C T); (2173 9747218 C
CT); (2174 9748048 A C); (2175 9748308 T C); (2176 9748365 A AG); (2177 9748591 T C); (2178 9748650
C T); (2179 9748769 T C); (2180 9748859 T C); (2181 9748905 C A); (2182 9749089 T C); (2183 9749178 G
T); (2184 9749195 G A); (2185 9749229 C G); (2186 9749539 T G); (2187 9766662 T C); (2188 9766788 G
A); (2189 9766859 C A); (2190 9767100 G A); (2191 9767124 T C); (2192 9767285 A G); (2193 9767519 A
G); (2194 9767753 C T); (2195 9767799 G A); (2196 9768102 T C); (2197 9768203 T G); (2198 9768426 A
C); (2199 9768471 T C); (2200 9768828 G A); (2201 9768931 G A); (2202 9769267 G T); (2203 9769435 G
A); (2204 9769878 A AGTGGCTTGGGCATGGTTT); (2205 9770022 G A); (2206 9770090 GA G); (2207
9770247 T C); (2208 9770430 G A); (2209 9770538 A C); (2210 9770562 A C); (2211 9770962 C G); (2212
9771115 T C); (2213 9771131 T G); (2214 9771236 T C); (2215 9771239 T C); (2216 9771318 G C); (2217
9771887 T C); (2218 9771947 T A); (2219 9772063 G A); (2220 9772096 C A); (2221 9772171 G A); (2222
9772237 T C); (2223 9772281 G A); (2224 9772282 A G); (2225 9772364 T C); (2226 9772547 G A); (2227
9772560 T C); (2228 9772766 T C); (2229 9772786 A G); (2230 9772792 C T); (2231 9772793 A G); (2232
9772794 C T); (2233 9772824 C T); (2234 9772842 T C); (2235 9772884 A G); (2236 9772910 C T); (2237
9772985 A G); (2238 9773977 A G); (2239 9774096 A T); (2240 9774458 C T); (2241 9774650 C T); (2242
9774744 G A); (2243 9774755 G T); (2244 9774757 C T); (2245 9774771 C T); (2246 9774912 A C); (2247
9774982 A C); (2248 9775019 G A); (2249 9775339 G C); (2250 9775343 T C); (2251 9775528 T C); (2252
9775586 G A); (2253 9775654 A T); (2254 9775747 T C); (2255 9775854 G A); (2256 9776066 G A); (2257
9776193 C T); (2258 9776270 T A); (2259 9776467 A C); (2260 9776533 A G); (2261 9776549 C T); (2262
9776694 G A); (2263 9776750 A C); (2264 9776864 C T); (2265 9777148 C T); (2266 9777157 G A); (2267
9777176 C T); (2268 9777254 G A); (2269 9777313 G A); (2270 9777474 C A); (2271 9777503 T C); (2272
9777725 C T); (2273 9777767 C T); (2274 9777781 G C); (2275 9777900 T A); (2276 9777901 A G); (2277
9778137 T C); (2278 9778198 A G); (2279 9778219 C T); (2280 9778514 C T); (2281 9778585 A G); (2282
9778641 G A); (2283 9778708 T C); (2284 9778824 A G); (2285 9778965 C T); (2286 9779007 G A); (2287
9779460 C A); (2288 9779492 G T); (2289 9779508 A G); (2290 9779562 A G); (2291 9780627 T C); (2292
9780892 T C); (2293 9780968 A G); (2294 9781049 C T); (2295 9781056 C G); (2296 9781217 T C); (2297
9781251 A G); (2298 9781262 G A); (2299 9781304 C T); (2300 9781334 C T); (2301 9781522 C T); (2302
9781653 T C); (2303 9781918 C T); (2304 9781936 G T); (2305 9782081 G A); (2306 9782359 T C); (2307
9782398 A G); (2308 9782604 A T); (2309 9782647 C A); (2310 9782651 C T); (2311 9782774 T C); (2312
9782828 C T); (2313 9786035 T C); (2314 9786079 T A); (2315 9786151 T C); (2316 9786205 C T); (2317
9786299 T C); (2318 9786349 CT C); (2319 9786548 A G); (2320 9786972 C G); (2321 9787053 C T); (2322
9787450 G A); (2323 9787587 A C); (2324 9787603 G C); (2325 9787640 A G); (2326 9787826 T C); (2327
9787879 C CA); (2328 9788105 C T); (2329 9788257 A G); (2330 9788358 C T); (2331 9788404 A G); (2332
9788426 A T); (2333 9788462 C A); (2334 9788688 T C); (2335 9788964 G A); (2336 9789035 C T); (2337
9789443 T C); (2338 9789484 C T); (2339 9789560 A G); (2340 9789638 G T); (2341 9790130 G T); (2342
9790195 A G); (2343 9790197 C T); (2344 9790731 A G); (2345 9790749 C A); (2346 9790806 C A); (2347
9790843 T C); (2348 9790873 G A); (2349 9790947 C T); (2350 9791258 G T); (2351 9791523 A G); (2352
9791730 G T); (2353 9791914 A G); (2354 9791973 G A); (2355 9792168 T C); (2356 9792267 A G); (2357
9792369 T C); (2358 9792436 T C); (2359 9792463 T C); (2360 9792598 C T); (2361 9792878 A C); (2362
9793343 C T); (2363 9793569 A C); (2364 9793647 G A); (2365 9793660 C A); (2366 9794277 T C); (2367
9794279 G A); (2368 9794343 A G); (2369 9794394 C A); (2370 9794873 T C); (2371 9794983 A T); (2372
9795235 G A); (2373 9795259 T TCACACATTTTGAA); (2374 9795429 G A); (2375 9795779 T C); (2376
9795820 G A); (2377 9796041 C T); (2378 9796079 GA G); (2379 9796155 C T); (2380 9796449 C T); (2381
9796897 C T); (2382 9797014 G C); (2383 9797267 A G); (2384 9797558 C A); (2385 9798278 G A); (2386
9798439 G T); (2387 9798460 T A); (2388 9798562 T G); (2389 9798815 G C); (2390 9798947 A G); (2391
9799007 A G); (2392 9799722 G A); (2393 9799784 G A); (2394 9800298 A C); (2395 9800342 T G); (2396
9800345 T C); (2397 9800424 T A); (2398 9800425 T G); (2399 9800494 C T); (2400 9800810 C T); (2401
9800886 A G); (2402 9800976 A G); (2403 9800977 T C); (2404 9801035 T C); (2405 9801085 G T); (2406
9801115 A G); (2407 9801171 G A); (2408 9801946 A G); (2409 9802093 C G); (2410 9802244 A T); (2411
9802544 G C); (2412 9802734 A C); (2413 9802793 C A); (2414 9802800 T A); (2415 9803157 C T); (2416
9803272 C T); (2417 9803377 C T); (2418 9803409 T C); (2419 9803766 AG A); (2420 9804039 T C); (2421
9805156 G A); (2422 9805186 T A); (2423 9805349 G A); (2424 9805532 AG A); (2425 9805717 G
A); (2426 9805990 C T); (2427 9806164 G A); (2428 9806265 G A); (2429 9806325 G A); (2430 9806392 C
T); (2431 9806488 C T); (2432 9806867 A C); (2433 9806921 G A); (2434 9806993 A G); (2435 9807015 C
T); (2436 9807197 C T); (2437 9807283 T C); (2438 9807521 T C); (2439 9807626 G A); (2440 9807672 G
T); (2441 9807815 T C); (2442 9808296 T C); (2443 9808551 A G); (2444 9808558 C G); (2445 9808569 G
T); (2446 9808591 G A); (2447 9808608 C G); (2448 9808630 C T); (2449 9808665 C T); (2450 9808763 A
G); (2451 9808901 T C); (2452 9809064 G A); (2453 9809248 G A); (2454 9809278 T C); (2455 9809309 T
G); (2456 9809310 T G); (2457 9809326 A G); (2458 9809360 G T); (2459 9809377 T G); (2460 9809459 A
C); (2461 9809588 A C); (2462 9809846 TC T); (2463 9810095 A G); (2464 9810216 CTCAA C); (2465
9810244 C T); (2466 9810624 A G); (2467 9810812 A T); (2468 9810819 G T); (2469 9810948 C
CAT); (2470 9811066 C G); (2471 9811146 GAGCAA G); (2472 9811262 T C); (2473 9811619 A C); (2474
9812024 T C); (2475 9812132 A C); (2476 9812225 A C); (2477 9812432 C T); (2478 9812458 T A); (2479
9812488 T C); (2480 9812518 C A); (2481 9812626 A G); (2482 9812793 G A); (2483 9812956 C T); (2484
9813049 G A); (2485 9813090 C T); (2486 9813109 G A); (2487 9813762 T C); (2488 9813848 G A); (2489
9813867 G A); (2490 9813926 T A); (2491 9814081 G A); (2492 9814119 G A); (2493 9814709 C T); (2494
9814817 A G); (2495 9814885 A G); (2496 9814919 C T); (2497 9815550 G A); (2498 9815766 G A); (2499
9815823 G A); (2500 9816281 C T); (2501 9816414 T A); (2502 9816608 T C); (2503 9816675 A C); (2504
9816729 A G); (2505 9817293 A C); (2506 9817356 A C); (2507 9817433 A G); (2508 9817751 C A); (2509
9818577 G A); (2510 9819066 C T); (2511 9819582 C T); (2512 9819583 A G); (2513 9819975 C T); (2514
9820060 A G); (2515 9820599 T G); (2516 9820741 C A); (2517 9821553 T G); (2518 9821879 A G); (2519
9822550 A G); (2520 9822633 T C); (2521 9822875 A T); (2522 9823488 C T); (2523 9823582 T A); (2524
9823590 C A); (2525 9824288 G A); (2526 9824379 G A); (2527 9824435 G A); (2528 9824636 A G); (2529
9824645 A G); (2530 9824723 A G); (2531 9824814 G A); (2532 9825287 G A); (2533 9825885 T C); (2534
9826382 A G); (2535 9826564 A C); (2536 9826593 G A); (2537 9826605 G C); (2538 9826667 C A); (2539
9826693 A C); (2540 9826716 A T); (2541 9826759 A T); (2542 9826786 A G); (2543 9826826 G A); (2544
9826868 G C); (2545 9826896 T G); (2546 9826900 G A); (2547 9826931 G T); (2548 9826937 C A); (2549
9826979 C T); (2550 9827072 A G); (2551 9827074 A G); (2552 9827132 A G); (2553 9827182 G A); (2554
9827278 C T); (2555 9827398 A G); (2556 9827400 T C); (2557 9827417 A C); (2558 9827439 A G); (2559
9827473 T C); (2560 9827475 T C); (2561 9827719 G A); (2562 9827807 T C); (2563 9827870 T C); (2564
9827986 G T); (2565 9828061 G A); (2566 9828570 G A); (2567 9828736 G A); (2568 9829045 C T); (2569
9829098 G A); (2570 9829370 T A); (2571 9829373 G T); (2572 9829619 TAAA T); (2573 9829800 G
A); (2574 9829840 G T); (2575 9829984 C T); (2576 9830084 C T); (2577 9830433 A C); (2578 9830508 A
G); (2579 9830891 T C); (2580 9830943 T A); (2581 9830998 A G); (2582 9831089 T G); (2583 9831454 G
A); (2584 9831681 T C); (2585 9831734 C T); (2586 9831767 T C); (2587 9831805 T C); (2588 9831902 T
C); (2589 9832129 C G); (2590 9832601 G A); (2591 9832625 A G); (2592 9832834 C A); (2593 9832984 T
C); (2594 9833602 G T); (2595 9835992 G GGAAGAA); (2596 9837562 G A); (2597 9838005 G A); (2598
9839875 G A); (2599 9839878 C A); (2600 9839888 C T); (2601 9839962 C T); (2602 9840159 T G); (2603
9841692 G T); (2604 9841857 C T); (2605 9842190 G A); (2606 9843187 A G); (2607 9844211 C T); (2608
9844220 T C); (2609 9844739 G T); (2610 9845179 A T); (2611 9845319 A G); (2612 9845375 G C); (2613
9845406 G T); (2614 9845453 C T); (2615 9845553 G A); (2616 9845578 G A); (2617 9845589 T C); (2618
9845595 T C); (2619 9845596 A G); (2620 9845603 C A); (2621 9845686 C T); (2622 9845716 C T); (2623
9845725 G A); (2624 9846033 A G); (2625 9846051 G A); (2626 9846133 T G); (2627 9846193 T A); (2628
9846463 T TAA); (2629 9846547 A T); (2630 9846809 C T); (2631 9847168 G A); (2632 9847275 A
T); (2633 9847581 A G); (2634 9847791 T C); (2635 9848747 C T); (2636 9848905 T C); (2637 9849044 C
T); (2638 9849048 C T); (2639 9849090 C T); (2640 9849154 T A); (2641 9849155 T A); (2642 9849195 G
A); (2643 9849430 A G); (2644 9849531 C G); (2645 9850344 T C); (2646 9850431 A G); (2647 9850638
AT A); (2648 9850709 C G); (2649 9850832 C T); (2650 9850843 C T); (2651 9850899 T C); (2652 9850949
G A); (2653 9851121 T C); (2654 9851122 G A); (2655 9851130 C T); (2656 9851304 C A); (2657 9851357
G A); (2658 9851443 C A); (2659 9851460 A G); (2660 9851492 A G); (2661 9851523 G A); (2662 9851541
C G); (2663 9851605 A G); (2664 9851696 A G); (2665 9851761 C T); (2666 9852000 C T); (2667 9852011
G A); (2668 9852049 C T); (2669 9852068 C T); (2670 9852093 T C); (2671 9852487 T A); (2672 9852905 C
T); (2673 9852956 C A); (2674 9852998 T C); (2675 9853007 G A); (2676 9853070 G A); (2677 9853107 T
TGGCGCTGGA); (2678 9853108 C T); (2679 9853123 T C); (2680 9853205 T C); (2681 9853208 C A); (2682
9853231 A G); (2683 9853237 G A); (2684 9853239 T C); (2685 9853334 G T); (2686 9853397 A G); (2687
9853404 C T); (2688 9853408 C T); (2689 9853736 G A); (2690 9854036 A C); (2691 9854055 C T); (2692
9854327 C T); (2693 9854441 C T); (2694 9854816 T C); (2695 9854885 G A); (2696 9854914 T C); (2697
9854964 T C); (2698 9854979 C CG); (2699 9855002 T C); (2700 9855169 T A); (2701 9855239 G A); (2702
9855272 C T); (2703 9855374 C T); (2704 9855403 G A); (2705 9855824 A G); (2706 9855975 C T); (2707
9856479 C T); (2708 9856494 G A); (2709 9856627 C T); (2710 9856666 A T); (2711 9856709 A C); (2712
9857102 C T); (2713 9857288 T C); (2714 9857825 A C); (2715 9857941 A G); (2716 9858163 T C); (2717
9858710 T G); (2718 9858902 G T); (2719 9859326 T A); (2720 9859552 C CA); (2721 9859610 G A); (2722
9859641 G A); (2723 9859871 C A); (2724 9860012 G A); (2725 9860109 T C); (2726 9860142 A G); (2727
9860636 C T); (2728 9860685 T C); (2729 9860896 C A); (2730 9860933 T G); (2731 9860956 A G); (2732
9860998 A G); (2733 9861062 G T); (2734 9861165 T C); (2735 9861300 G C); (2736 9861447 A G); (2737
9861497 T C); (2738 9861505 C T); (2739 9861570 T C); (2740 9861586 G A); (2741 9861653 T C); (2742
9861849 T C); (2743 9861954 T C); (2744 9862004 G A); (2745 9862031 T C); (2746 9862072 G A); (2747
9862181 G A); (2748 9862191 G A); (2749 9862239 G GT); (2750 9862335 C T); (2751 9862618 T C); (2752
9862814 T C); (2753 9862855 T C); (2754 9863164 G C); (2755 9863286 T C); (2756 9863391 G C); (2757
9863543 AAGAGCT A); (2758 9863794 G A); (2759 9863821 G C); (2760 9864139 T C); (2761 9864174 A
G); (2762 9864208 T C); (2763 9864233 C T); (2764 9864533 AT A); (2765 9864628 T C); (2766 9864967 C
T); (2767 9864978 GA G); (2768 9865086 A G); (2769 9865198 C T); (2770 9865203 T C); (2771 9865337 C
T); (2772 9865340 G A); (2773 9865349 A C); (2774 9865419 C T); (2775 9865437 C T); (2776 9865459 T
C); (2777 9865465 T A); (2778 9865469 T C); (2779 9865563 T C); (2780 9865623 GA G); (2781 9865658 T
TA); (2782 9866004 A T); (2783 9866081 T G); (2784 9866292 T TA); (2785 9866808 A G); (2786 9867099
G A); (2787 9867446 CA C); (2788 9868338 G A); (2789 9868372 TTAATACAA T); (2790 9868487 C
A); (2791 9868591 C T); (2792 9868790 A T); (2793 9868987 C A); (2794 9869259 T A); (2795 9869261 AT
A); (2796 9869505 A C); (2797 9869545 T G); (2798 9869573 G T); (2799 9869769 C A); (2800 9869936 T
C); (2801 9869999 A AT); (2802 9870073 GT G); (2803 9870188 C A); (2804 9870204 T C); (2805 9870277
A G); (2806 9870279 G C); (2807 9870381 C G); (2808 9870455 A T); (2809 9870461 A T); (2810 9870578
T C); (2811 9870795 C A); (2812 9870928 C T); (2813 9870996 A G); (2814 9871299 T A); (2815 9871451 A
T); (2816 9871506 G A); (2817 9871613 T C); (2818 9871669 G A); (2819 9871792 T C); (2820 9871818 A
G); (2821 9871953 A C); (2822 9872014 G A); (2823 9872030 T G); (2824 9872160 T TA); (2825 9872223 A
G); (2826 9872291 A G); (2827 9872325 G A); (2828 9872367 A G); (2829 9872415 C T); (2830 9872444 C
A); (2831 9872539 T C); (2832 9872585 T C); (2833 9872641 A G); (2834 9872757 G A); (2835 9872775 G
A); (2836 9873097 A G); (2837 9873519 T C); (2838 9873562 C T); (2839 9873602 A G); (2840 9873778 G
A); (2841 9874260 G A); (2842 9874350 C T); (2843 9874471 G A); (2844 9874503 A G); (2845 9874520 A
G); (2846 9874652 G A); (2847 9874677 A G); (2848 9874685 T C); (2849 9874699 C T); (2850 9874792 A
G); (2851 9874802 C T); (2852 9874820 T C); (2853 9874889 T C); (2854 9875045 A G); (2855 9875048 T
C); (2856 9875107 A G); (2857 9875359 A G); (2858 9875470 A G); (2859 9875477 TA T); (2860 9875550
G A); (2861 9875600 G T); (2862 9875606 T C); (2863 9875685 A C); (2864 9875753 C T); (2865 9876086
C T); (2866 9876189 A G); (2867 9876199 A G); (2868 9876211 T C); (2869 9876256 C T); (2870 9876451
A G); (2871 9876555 A G); (2872 9876568 A AT); (2873 9876703 T C); (2874 9876726 G A); (2875
9876737 A G); (2876 9876803 A G); (2877 9876886 G A); (2878 9876999 C T); (2879 9877028 C T); (2880
9877103 A T); (2881 9877298 C T); (2882 9877327 A G); (2883 9877429 G C); (2884 9877431 T C); (2885
9877435 A G); (2886 9877446 A G); (2887 9877552 T C); (2888 9877570 G A); (2889 9877969 G T); (2890
9878023 C T); (2891 9878081 C T); (2892 9878082 A G); (2893 9878246 G A); (2894 9878263 T C); (2895
9878351 A G); (2896 9878364 T A); (2897 9878665 A G); (2898 9878859 A C); (2899 9878916 T C); (2900
9879047 T C); (2901 9879061 G A); (2902 9879138 A G); (2903 9879139 A T); (2904 9879232 T A); (2905
9879438 C T); (2906 9879450 T C); (2907 9879470 T G); (2908 9879482 A G); (2909 9879484 C T); (2910
9879496 A G); (2911 9879572 T C); (2912 9879979 T C); (2913 9880477 G A); (2914 9880601 T C); (2915
9880685 C T); (2916 9880695 C T); (2917 9880737 A G); (2918 9880747 T C); (2919 9880830 T G); (2920
9880910 A G); (2921 9880927 T G); (2922 9880943 G T); (2923 9881144 ATT A); (2924 9881653 T
C); (2925 9881745 A T); (2926 9881791 T C); (2927 9881821 T C); (2928 9882564 A G); (2929 9882658 A
G); (2930 9882741 G A); (2931 9882755 G T); (2932 9882898 T C); (2933 9883078 C T); (2934 9883089 CT
C); (2935 9883526 A G); (2936 9883661 A G); (2937 9883784 T C); (2938 9883789 G C); (2939 9883803 A
G); (2940 9884181 G A); (2941 9884183 A C); (2942 9884822 G T); (2943 9884831 T C); (2944 9884832 A
G); (2945 9885028 G A); (2946 9885326 G A); (2947 9885338 A G); (2948 9885519 G A); (2949 9885598 G
T); (2950 9885742 A G); (2951 9885860 T C); (2952 9885881 A C); (2953 9885898 G C); (2954 9885920 C
T); (2955 9885938 A G); (2956 9885950 C T); (2957 9886223 T C); (2958 9886450 T C); (2959 9886606 A
G); (2960 9886788 A T); (2961 9887193 A G); (2962 9887669 T G); (2963 9887897 A G); (2964 9888383 T
G); (2965 9888529 C T); (2966 9888530 G A); (2967 9888572 A G); (2968 9888897 G A); (2969 9888936 T
C); (2970 9889109 A C); (2971 9889680 A G); (2972 9889836 T C); (2973 9889906 G A); (2974 9890409 A
G); (2975 9890795 C T); (2976 9890856 C T); (2977 9890881 T C); (2978 9890892 G A); (2979 9890976 T
C); (2980 9891033 A G); (2981 9891118 T C); (2982 9891201 T C); (2983 9891279 G A); (2984 9891424 G
T); (2985 9891484 T C); (2986 9891498 G A); (2987 9891528 C T); (2988 9891590 C T); (2989 9891936 G
A); (2990 9891960 C T); (2991 9891995 G A); (2992 9892173 G A); (2993 9892236 A G); (2994 9892521 G
A); (2995 9892553 A G); (2996 9892581 C T); (2997 9892592 T C); (2998 9892629 G A); (2999 9892763 T
C); (3000 9892787 C T); (3001 9893054 G A); (3002 9893065 T C); (3003 9893108 A G); (3004 9893132 G
A); (3005 9893161 T C); (3006 9893239 A G); (3007 9893272 G A); (3008 9893283 G T); (3009 9893327 T
G); (3010 9893359 G A); (3011 9893457 C A); (3012 9893732 A G); (3013 9893972 G A); (3014 9894411 A
G); (3015 9894619 A G); (3016 9895052 C T); (3017 9896333 G A); (3018 9897167 C T); (3019 9897254 C
A); (3020 9897866 A G); (3021 9898843 A C); (3022 9898926 T TAC); (3023 9898933 C A); (3024 9899029
A C); (3025 9899056 C T); (3026 9899064 G T); (3027 9899076 A G); (3028 9899135 C T); (3029 9899161 T
C); (3030 9899162 A G); (3031 9899172 A G); (3032 9900237 A G); (3033 9900282 T C); (3034 9900387 T
C); (3035 9900931 T A); (3036 9901491 T C); (3037 9901492 G A); (3038 9901519 T C); (3039 9901560 A
G); (3040 9901759 T C); (3041 9901823 A G); (3042 9902035 T C); (3043 9902136 T C); (3044 9902152 T
TACGA); (3045 9902241 G A); (3046 9902373 T A); (3047 9902388 TA T); (3048 9902412 T G); (3049
9902731 C G); (3050 9903060 G GA); (3051 9903113 C T); (3052 9903289 A G); (3053 9903296 G
T); (3054 9903390 C A); (3055 9903475 C A); (3056 9903479 GA G); (3057 9903587 G A); (3058 9903618
G A); (3059 9904003 A G); (3060 9904255 CA C); (3061 9904289 TTTAA T); (3062 9904370 A AC); (3063
9904583 A C); (3064 9905036 C T); (3065 9905190 T C); (3066 9905530 G A); (3067 9905558 T
TGTTTTTGAA); (3068 9905571 T G); (3069 9905725 T G); (3070 9905799 G A); (3071 9905809 A G); (3072
9905883 G A); (3073 9905931 C T); (3074 9906021 G A); (3075 9906084 A G); (3076 9906100 C A); (3077
9906414 G A); (3078 9906654 T C); (3079 9906669 TA T); (3080 9906944 C T); (3081 9906975 G A); (3082
9907517 A G); (3083 9907562 A C); (3084 9907627 C T); (3085 9907725 T C); (3086 9907811 AC A); (3087
9907875 A G); (3088 9908249 G A); (3089 9908265 T G); (3090 9908315 A G); (3091 9908692 A T); (3092
9908722 T C); (3093 9908771 G A); (3094 9908815 C T); (3095 9908933 C T); (3096 9909070 T C); (3097
9909099 C T); (3098 9909227 A G); (3099 9909339 G C); (3100 9909366 GT G); (3101 9909387 G
A); (3102 9910286 G C); (3103 9910423 C T); (3104 9910499 T C); (3105 9910665 G A); (3106 9910696 GT
G); (3107 9910776 T C); (3108 9910789 A G); (3109 9910821 T G); (3110 9911261 G A); (3111 9911515 A
C); (3112 9912066 C CT); (3113 9912105 T C); (3114 9912455 A G); (3115 9912486 A G); (3116 9912505 G
A); (3117 9912511 A G); (3118 9912554 T C); (3119 9912603 A G); (3120 9912680 C T); (3121 9912698 T
C); (3122 9912748 G C); (3123 9912788 C T); (3124 9912847 A G); (3125 9912959 C T); (3126 9913278 A
G); (3127 9913306 T C); (3128 9913476 A G); (3129 9913737 A G); (3130 9913784 A G); (3131 9914143 A
G); (3132 9914179 A G); (3133 9914283 G A); (3134 9914288 A G); (3135 9914630 A G); (3136 9914706 C
T); (3137 9914715 C T); (3138 9914723 G A); (3139 9914764 T C); (3140 9914843 T G); (3141 9914865 A
G); (3142 9914988 T C); (3143 9915110 T A); (3144 9915477 G A); (3145 9915480 T G); (3146 9915485 T
C); (3147 9915699 G T); (3148 9916666 A G); (3149 9916668 C T); (3150 9917066 C T); (3151 9917206 A
C); (3152 9917348 G A); (3153 9917355 G T); (3154 9917369 G A); (3155 9917655 G A); (3156 9917762 T
A); (3157 9917879 A G); (3158 9917933 C A); (3159 9918216 T C); (3160 9918725 G A); (3161 9918902 T
C); (3162 9918935 G A); (3163 9918994 T C); (3164 9919069 A G); (3165 9919079 A G); (3166 9919089 T
C); (3167 9919115 G T); (3168 9919123 A G); (3169 9919138 T C); (3170 9919157 A T); (3171 9919158 T
G); (3172 9919192 A C); (3173 9919269 C T); (3174 9919506 T G); (3175 9919564 C A); (3176 9919591 C
T); (3177 9920109 T C); (3178 9920590 A G); (3179 9920698 A G); (3180 9920834 C T); (3181 9921059 T
C); (3182 9921079 G A); (3183 9921097 T C); (3184 9921115 G A); (3185 9921226 T C); (3186 9921275 A
G); (3187 9921402 A G); (3188 9921421 A G); (3189 9921698 T C); (3190 9921788 T C); (3191 9921854 G
A); (3192 9921975 T G); (3193 9922069 T C); (3194 9922139 T C); (3195 9922394 A C); (3196 9922457 T
C); (3197 9922525 T C); (3198 9922717 G A); (3199 9922908 T C); (3200 9922962 A G); (3201 9923309 A
T); (3202 9923463 G A); (3203 9924577 G A); (3204 9925033 T C); (3205 9925524 C T); (3206 9925625 G
C); (3207 9926198 G A); (3208 9926476 C T); (3209 9926600 T C); (3210 9926946 A G); (3211 9927015 T
C); (3212 9927031 T G); (3213 9927175 T C); (3214 9927387 T C); (3215 9927435 A G); (3216 9927724 G
A); (3217 9927981 T A); (3218 9928077 T C); (3219 9928123 G A); (3220 9928152 A C); (3221 9928153 G
A); (3222 9928154 T C); (3223 9928155 G T); (3224 9928317 A C); (3225 9928325 C T); (3226 9928657 C
T); (3227 9928750 C T); (3228 9928858 A G); (3229 9928955 C A); (3230 9928974 A C); (3231 9929191 A
ATTACTATTATTATTATTATTATTG); (3232 9929240 T C); (3233 9929274 C T); (3234 9929420 A G); (3235
9929491 A G); (3236 9929508 ACCC A); (3237 9929757 C G); (3238 9929791 G A); (3239 9929862 G
A); (3240 9930019 A G); (3241 9930054 AT A); (3242 9930100 T A); (3243 9930119 C T); (3244 9930124 A
G); (3245 9930125 G C); (3246 9930126 C T); (3247 9930189 A G); (3248 9930213 A T); (3249 9930245 G
A); (3250 9930273 GA G); (3251 9930503 A G); (3252 9930595 T C); (3253 9931046 T C); (3254 9931102 T
G); (3255 9931390 A G); (3256 9931401 T C); (3257 9931433 C A); (3258 9931437 G A); (3259 9931460 T
C); (3260 9931761 A G); (3261 9931871 T C); (3262 9932054 T C); (3263 9932592 C T); (3264 9932719 G
A); (3265 9932738 C T); (3266 9932815 T A); (3267 9933791 A C); (3268 9933816 G T); (3269 9933991 A
G); (3270 9936932 T C); (3271 9937601 G A); (3272 9937905 T A); (3273 9938288 G A); (3274 9938493 C
G); (3275 9938553 T C); (3276 9939296 C A); (3277 9939396 A G); (3278 9939638 T C); (3279 9939650 G
A); (3280 9939678 C A); (3281 9940006 C A); (3282 9940114 C T); (3283 9940171 A C); (3284 9940211 A
T); (3285 9940319 G A); (3286 9940325 A G); (3287 9940327 T G); (3288 9940413 T C); (3289 9940420 A
G); (3290 9940481 T A); (3291 9940587 T C); (3292 9941272 C T); (3293 9941367 A G); (3294 9941776 A
C); (3295 9942111 T C); (3296 9942219 A G); (3297 9942404 A G); (3298 9943103 G A); (3299 9943180 C
T); (3300 9943239 A G); (3301 9943449 A T); (3302 9943615 A C); (3303 9943618 G A); (3304 9944209 G
A); (3305 9944334 G A); (3306 9944396 T C); (3307 9944408 C G); (3308 9944494 C T); (3309 9944960 T
C); (3310 9945158 T C); (3311 9945623 G A); (3312 9945742 A G); (3313 9945758 A G); (3314 9945774
TTG T); (3315 9945807 G A); (3316 9946109 A G); (3317 9946207 A T); (3318 9946246 T A); (3319
9946328 G A); (3320 9946332 A T); (3321 9946402 G A); (3322 9946409 C T); (3323 9946774 T G); (3324
9946980 C T); (3325 9947270 G C); (3326 9947455 T A); (3327 9947465 A G); (3328 9947528 A G); (3329
9947582 CA C); (3330 9948002 T G); (3331 9948235 CT C); (3332 9948816 C T); (3333 9949058 A
G); (3334 9949324 C T); (3335 9950465 A G); (3336 9950682 G T); (3337 9950858 C T); (3338 9951041 T
C); (3339 9951374 T C); (3340 9951588 C T); (3341 9951619 A G); (3342 9951641 T G); (3343 9952034 T
C); (3344 9952244 G A); (3345 9952472 G C); (3346 9953202 C T); (3347 9953228 A G); (3348 9953346 C
T); (3349 9953356 G A); (3350 9953386 C T); (3351 9953709 T TG); (3352 9954093 C A); (3353 9954174 C
T); (3354 9954191 T C); (3355 9955211 G T); (3356 9960684 CACAACAG C); (3357 9961405 A G); (3358
9961697 C T); (3359 9961932 A AT); (3360 9961993 A G); (3361 9962057 A T); (3362 9962637 T A); (3363
9963642 G A); (3364 9963980 G T); (3365 9964360 AT A); (3366 9964369 C T); (3367 9964550 G A); (3368
9964595 T C); (3369 9964712 A C); (3370 9964741 A G); (3371 9965412 A G); (3372 9965530 G A); (3373
9965571 T TA); (3374 9965713 T A); (3375 9965849 T G); (3376 9966113 A AT); (3377 9966890 G
T); (3378 9967200 G A); (3379 9967519 G A); (3380 9967528 A AAGGTG); (3381 9968097 G C); (3382
9968304 A G); (3383 9968808 A AT); (3384 9969430 G C); (3385 9969527 T TA); (3386 9973835 T
A); (3387 9974181 A G); (3388 9974474 C T); (3389 9974770 C T); (3390 9975102 AT A); (3391 9975289 G
A); (3392 9975478 C T); (3393 9975528 G A); (3394 9975784 C T); (3395 9976194 C T); (3396 9976237 C
T); (3397 9976253 GCAACTTTTGGCAACA G); (3398 9976347 T G); (3399 9977196 G A); (3400 9978449 G
A); (3401 9979232 A C); (3402 9979377 C T); (3403 9979821 C G); (3404 9980013 A T); (3405 9980369 A
T); (3406 9980854 C T); (3407 9981001 C T); (3408 9981095 G A); (3409 9981139 A G); (3410 9981251 A
G); (3411 9981781 C T); (3412 9982469 A G); (3413 9982606 C G); (3414 9983560 G C); (3415 9983591 G
A); (3416 9984336 A G); (3417 9984639 C T); (3418 9985324 C T); (3419 9986240 T C); (3420 9986710 C
T); (3421 9987822 G A); (3422 9987863 T A); (3423 9987883 A G); (3424 9988484 A G); (3425 9988993 G
A); (3426 9989478 T C); (3427 9990917 C T); (3428 9991022 C A); (3429 9991164 A AG); (3430 9991206 A
G); (3431 9991254 A G); (3432 9991328 T C); (3433 9991938 T C); (3434 9992163 G A); (3435 9993582 T
C); (3436 9993843 C T); (3437 9994102 G A); (3438 10005182 G A); (3439 10005221 G A); (3440
10005953 A G); (3441 10006306 A G); (3442 10006308 C T); (3443 10006468 G A); (3444 10006765 G
T); (3445 10007105 A G); (3446 10007888 C A); (3447 10008071 G T); (3448 10008094 G A); (3449
10008238 T C); (3450 10009156 G A); (3451 10010904 A G); (3452 10011566 A G); (3453 10011574 G
T); (3454 10011634 A G); (3455 10012253 T C); (3456 10012341 G A); (3457 10012386 A G); (3458
10013958 A T); (3459 10014019 G A); (3460 10015872 C A); (3461 10016751 A G); (3462 10016879 C
T); (3463 10016883 A G); (3464 10017093 T C); (3465 10017166 A G); (3466 10017217 G A); (3467
10017253 T C); (3468 10017616 G GT); (3469 10018002 G A); (3470 10018081 G A); (3471 10018452 T
C); (3472 10018461 A G); (3473 10018539 A G); (3474 10018545 G T); (3475 10018551 G A); (3476
10018581 C T); (3477 10018590 C T); (3478 10018828 A G); (3479 10019076 G A); (3480 10019111 T
C); (3481 10020301 T C); (3482 10020407 AGC A); (3483 10020700 C T); (3484 10021186 C T); (3485
10021187 A G); (3486 10021203 A AT); (3487 10022026 A ATATATATATATG); (3488 10022082 A
T); (3489 10022124 G C); (3490 10022967 T C); (3491 10023821 G T); (3492 10024331 T C); (3493
10024489 A G); (3494 10024510 A C); (3495 10025699 T C); (3496 10026639 T G); (3497 10026770 C
T); (3498 10027551 G C); (3499 10028076 T A); (3500 10028082 C T); (3501 10028290 T C); (3502
10029886 C T); (3503 10030409 T A); (3504 10030748 C T); (3505 10030850 G A); (3506 10030946 C
T); (3507 10031562 A T); (3508 10031826 C T); (3509 10031859 T G); (3510 10032867 A G); (3511
10033750 A C); (3512 10033756 A G); (3513 10034895 G T); (3514 10034926 C T); (3515 10035682 A
G); (3516 10036079 A G); (3517 10036267 A G); (3518 10036269 G A); (3519 10036283 C T); (3520
10036284 A G); (3521 10036379 G A); (3522 10036442 T C); (3523 10037260 TA T); (3524 10037382 T
TA); (3525 10037881 A T); (3526 10037891 T A); (3527 10038900 T C); (3528 10040185 C A); (3529
10040535 A C); (3530 10040806 A G); (3531 10040991 C G); (3532 10042843 T C); (3533 10043955 CT
C); (3534 10044537 C T); (3535 10045127 AT A); (3536 10045162 T TA); (3537 10045290 G A); (3538
10045361 G T); (3539 10045739 C T); (3540 10046273 C T); (3541 10046413 G A); (3542 10046416 G
A); (3543 10046421 C T); (3544 10046903 T C); (3545 10046940 A G); (3546 10047874 C T); (3547
10049142 C T); (3548 10050487 C T); (3549 10050608 T C); (3550 10051024 C T); (3551 10051175 G
T); (3552 10051393 T G); (3553 10051871 C T); (3554 10052086 A G); (3555 10052878 T A); (3556
10054531 G A); (3557 10055765 C CA); (3558 10056012 A ATTATCTATCTT); (3559 10056735 G A); (3560
10056912 C A); (3561 10056972 G A); (3562 10058310 A G); (3563 10062027 G A); (3564 10064510 G
T); (3565 10064774 G A); (3566 10065555 A G); (3567 10065568 A T); (3568 10065727 T G); (3569
10065804 T C); (3570 10065887 C T); (3571 10066455 C T); (3572 10067105 C T); (3573 10067146 T
C); (3574 10067826 TA T); (3575 10070284 G T); (3576 10070518 G A); (3577 10070946 C CAA); (3578
10071616 G A); (3579 10071739 T G); (3580 10071864 G A); (3581 10071931 TA T); (3582 10072931 A
G); (3583 10073443 T A); (3584 10073983 G A); (3585 10074721 T C); (3586 10074823 G A); (3587
10077861 CATATATATAT C); (3588 10082486 T C); (3589 10082575 G A); (3590 10083027 G T); (3591
10083901 T C); (3592 10083942 C G); (3593 10084430 C T); (3594 10084921 T C); (3595 10085379 C
A); (3596 10086422 T C); (3597 10087625 G A); (3598 10087655 C T); (3599 10087674 G A); (3600
10087693 C T); (3601 10087759 T C); (3602 10087761 C T); (3603 10090671 A G); (3604 10091409 T
C); (3605 10093615 C T); (3606 10093774 A G); (3607 10093893 T C); (3608 10093908 A T); (3609
10094020 C T); (3610 10094169 C CG); (3611 10094284 CA C); (3612 10094571 C T); (3613 10094854 A
G); (3614 10096086 C T); (3615 10096148 G A); (3616 10097436 C T); (3617 10097513 G C); (3618
10097669 T C); (3619 10097831 T G); (3620 10097983 A T); (3621 10098433 A G); (3622 10098628 T
C); (3623 10098744 T C); (3624 10099010 A G); (3625 10099526 T C); (3626 10099655 T
TTGGATGTG); (3627 10099738 C A); (3628 10099752 T C); (3629 10100358 G A); (3630 10102932 G
A); (3631 10103239 C CTT); (3632 10103286 T C); (3633 10103367 T C); (3634 10103405 T A); (3635
10103407 T A); (3636 10103409 T A); (3637 10103420 C T); (3638 10103978 C T); (3639 10104636 A
C); (3640 10106219 A G); (3641 10107331 C A); (3642 10107740 T G); (3643 10107982 G A); (3644
10108492 A T); (3645 10108590 T C); (3646 10108618 T C); (3647 10108683 C T); (3648 10108929 C
T); (3649 10109447 G A); (3650 10111136 A G); (3651 10111177 A T); (3652 10111307 G A); (3653
10112784 CA C); (3654 10112845 A C); (3655 10113055 TAA T); (3656 10113155 A AAT); (3657
10113206 A G); (3658 10114399 GT G); (3659 10114463 A G); (3660 10114937 C T); (3661 10115688 TA
T); (3662 10116627 T C); (3663 10117060 A G); (3664 10117154 A G); (3665 10118749 A G); (3666
10120512 A G); (3667 10124209 T C); (3668 10126825 C T); (3669 10126998 C CAT); (3670 10128142 G
A); (3671 10128403 A C); (3672 10128514 G A); (3673 10129033 T C); (3674 10129213 C T); (3675
10129263 A G); (3676 10129492 C CTG); (3677 10129837 A AAT); (3678 10131119 C T); (3679 10131417
C T); (3680 10131914 T C); (3681 10131981 C A); (3682 10132576 C G); (3683 10132590 C T); (3684
10133823 G T); (3685 10133915 T TTTTA); (3686 10134043 T C); (3687 10134453 T C); (3688 10134492 G
A); (3689 10134908 GT G); (3690 10135584 T G); (3691 10135617 C CTAGA); (3692 10136188 G A); (3693
10136470 G A); (3694 10137487 T C); (3695 10137617 A G); (3696 10137806 C T); (3697 10138612 G
A); (3698 10138667 G A); (3699 10138774 A T); (3700 10138803 T C); (3701 10139527 TA T); (3702
10139669 AT A); (3703 10140491 A C); (3704 10140759 AAAG A); (3705 10142796 C T); (3706 10142852
C T); (3707 10144731 T C); (3708 10145900 C T); (3709 10146461 A G); (3710 10146508 TATAACC
T); (3711 10146587 C A); (3712 10147277 T C); (3713 10148386 G A); (3714 10149197 G A); (3715
10149910 A C); (3716 10149964 A G); (3717 10150154 A G); (3718 10150301 A C); (3719 10151784 T
C); (3720 10152030 A G); (3721 10152467 A G); (3722 10152728 A T); (3723 10152991 T C); (3724
10153163 G A); (3725 10153766 G T); (3726 10154455 C G); (3727 10155043 GT G); (3728 10155154 C
T); (3729 10155210 G A); (3730 10155337 C T); (3731 10155860 C T); (3732 10156469 G A); (3733
10157183 T A); (3734 10157213 A G); (3735 10157256 T C); (3736 10158699 C G); (3737 10158834 C
A); (3738 10160281 C CA); (3739 10161130 C T); (3740 10161401 T A); (3741 10161976 A G); (3742
10161977 G A); (3743 10163392 C T); (3744 10163449 T G); (3745 10163565 A AT); (3746 10163732 C
A); (3747 10163763 A G); (3748 10164387 A G); (3749 10164451 G A); (3750 10164650 T C); (3751
10164802 G A); (3752 10165422 C G); (3753 10165518 T A); (3754 10165646 G T); (3755 10165686 G
A); (3756 10165731 T C); (3757 10165746 T C); (3758 10166532 G A); (3759 10166559 A G); (3760
10166603 A T); (3761 10166652 G A); (3762 10166764 A C); (3763 10166808 G A); (3764 10167704 T
G); (3765 10168012 G C); (3766 10168017 G GAC); (3767 10170440 C A); (3768 10170829 G T); (3769
10170966 G A); (3770 10171056 T C); (3771 10172344 C T); (3772 10172462 G T); (3773 10172463 G
A); (3774 10173323 C A); (3775 10173333 A G); (3776 10173428 T C); (3777 10173530 T C); (3778
10173927 C T); (3779 10174019 C T); (3780 10175148 C T); (3781 10175188 G A); (3782 10175389 A
G); (3783 10176092 G A); (3784 10176700 C T); (3785 10176981 T C); (3786 10177025 G A); (3787
10177263 T TA); (3788 10177733 G A); (3789 10178559 T TA); (3790 10179678 A G); (3791 10179760 C
T); (3792 10179839 C T); (3793 10179878 A G); (3794 10180791 A G); (3795 10181161 T C); (3796
10182512 G A); (3797 10182785 C T); (3798 10183114 T C); (3799 10183573 A T); (3800 10183801 T
C); (3801 10184480 G A); (3802 10184482 G A); (3803 10186558 C T); (3804 10186634 A G); (3805
10186835 C T); (3806 10187486 G A); (3807 10189978 G A); (3808 10189991 G A); (3809 10191590 C
T); (3810 10191591 G A); (3811 10191967 C T); (3812 10193886 G A); (3813 10195420 A T); (3814
10195421 T A); (3815 10195422 A T); (3816 10195423 T A); (3817 10195424 A T); (3818 10195824 A
T); (3819 10196747 G A); (3820 10196877 C T); (3821 10196889 GA G); (3822 10197525 A C); (3823
10201121 A C); (3824 10202303 C T); (3825 10202410 G A); (3826 10202460 C T); (3827 10203192 A
G); (3828 10203197 A T); (3829 10204559 AT A); (3830 10207533 A T); (3831 10208756 C T); (3832
10215839 GGAC G); (3833 10217630 C CTTTCA); (3834 10217871 G A); (3835 10217913 G A); (3836
10218403 A G); (3837 10218447 A G); (3838 10219191 T G); (3839 10220632 T C); (3840 10220874 T
C); (3841 10222622 G C); (3842 10222632 A G); (3843 10222932 T C); (3844 10223175 G A); (3845
10224976 G A); (3846 10224978 G GTGTTGAATGA); (3847 10225038 A G); (3848 10225146 T C); (3849
10225199 G A); (3850 10225256 T C); (3851 10226166 A T); (3852 10226539 T G); (3853 10226639 A
T); (3854 10226640 T A); (3855 10226686 A G); (3856 10229712 G GAAAAAGAGAAAAA); (3857
10234047 T C); (3858 10234051 AT A); (3859 10234954 T A); (3860 10236973 G A); (3861 10236980 C
A); (3862 10241527 C T); (3863 10243470 T TTTACCCTTCGTGACGCAACATGACTGCTGG); (3864 10245896
G T); (3865 10245943 T C); (3866 10245981 G A); (3867 10246092 G A); (3868 10246484 G A); (3869
10246577 T TA); (3870 10246764 A G); (3871 10246792 A AATT); (3872 10247956 G A); (3873 10247979
G A); (3874 10248291 G A); (3875 10248427 G A); (3876 10248446 T C); (3877 10248462 G A); (3878
10248505 T C); (3879 10248729 A G); (3880 10248751 G A); (3881 10248755 G A); (3882 10248850 C
T); (3883 10249288 G A); (3884 10250487 C T); (3885 10250878 G T); (3886 10251014 C T); (3887
10251050 A G); (3888 10255731 TGCAGTG T); (3889 10262570 A G); (3890 10264058 G A); (3891
10264061 T C); (3892 10265321 G T); (3893 10265322 C T); (3894 10275803 T C); (3895 10277533 G
A); (3896 10279100 C T); (3897 10279311 A G); (3898 10279561 A C); (3899 10280435 A G); (3900
10280535 A T); (3901 10281336 G A); (3902 10281338 T A); (3903 10282419 C T); (3904 10282896 C
A); (3905 10286276 A AG); (3906 10287794 T A); (3907 10292046 G A); (3908 10292842 T C); (3909
10295046 G A); (3910 10301761 G A); (3911 10301786 G A); (3912 10301944 C T); (3913 10302115 T
C); (3914 10307203 G T); (3915 10307804 T C); (3916 10309238 T TA); (3917 10309583 GA G); (3918
10309672 T A); (3919 10311350 AT A); (3920 10312410 AAGAG A); (3921 10313534 C T); (3922
10318478 C T); (3923 10319254 ATGCTG A); (3924 10319594 C G); (3925 10319714 G A); (3926
10319784 T A); (3927 10319944 C T); (3928 10319993 C A); (3929 10320527 G C); (3930 10320713 C
T); (3931 10320733 GA G); (3932 10320742 G A); (3933 10320753 C T); (3934 10321858 T G); (3935
10322852 G A); (3936 10322993 T C); (3937 10323338 GT G); (3938 10325415 T A); (3939 10330889 C
T); (3940 10336113 C T); (3941 10336128 A G); (3942 10336227 C G); (3943 10336317 T A); (3944
10336386 C T); (3945 10336410 G A); (3946 10336880 C T); (3947 10338579 A G); (3948 10342374 G
A); (3949 10342603 G A); (3950 10343503 TA T); (3951 10346041 A G); (3952 10346050 T C); (3953
10347073 C T); (3954 10356845 A AT); (3955 10357853 TAG T); (3956 10358135 T TA); (3957 10358485
TA T); (3958 10359153 GA G); (3959 10361243 T C); (3960 10362127 T C); (3961 10362167 A G); (3962
10363298 C A); (3963 10363626 T C); (3964 10363775 GA G); (3965 10364141 A T); (3966 10364197 C
A); (3967 10364311 T A); (3968 10364312 T A); (3969 10364322 T C); (3970 10364350 A AT); (3971
10364469 C CA); (3972 10364742 T A); (3973 10364974 C T); (3974 10365115 C T); (3975 10365128 C
T); (3976 10365131 G A); (3977 10365325 C T); (3978 10365379 G A); (3979 10365424 GA G); (3980
10365666 GA G); (3981 10368032 G A); (3982 10368392 G A); (3983 10368506 G A); (3984 10368583 A
AT); (3985 10369457 G T); (3986 10371781 A G); (3987 10372421 T G); (3988 10372461 A
AGGAGTTATTTGAGGACAC); (3989 10374192 GA G); (3990 10374706 T A); (3991 10374888 A G); (3992
10375330 T C); (3993 10375417 A C); (3994 10375560 C T); (3995 10375582 A G); (3996 10375954 A
G); (3997 10377099 G A); (3998 10377595 G A); (3999 10377616 T C); (4000 10378803 G A); (4001
10379161 T C); (4002 10379280 A G); (4003 10380788 T C); (4004 10380839 AAG A); (4005 10380994 A
C); (4006 10381347 G A); (4007 10382196 T C); (4008 10382836 G A); (4009 10383977 C G); (4010
10387102 T G); (4011 10389697 G A); (4012 10390928 T A); (4013 10391173 A G); (4014 10391631 T
A); (4015 10391638 T C); (4016 10391848 C A); (4017 10391871 A G); (4018 10392671 C A); (4019
10393413 G A); (4020 10394345 A G); (4021 10394380 T C); (4022 10394437 A G); (4023 10398791 C
T); (4024 10398936 C T); (4025 10400987 A G); (4026 10403943 TG T); (4027 10404593 G A); (4028
10407504 T A); (4029 10408992 A G); (4030 10409134 C T); (4031 10410655 T G); (4032 10412326 G
A); (4033 10415313 T C); (4034 10415583 TA T); (4035 10415651 T C); (4036 10415981 T A); (4037
10416695 T TAAATTTC); (4038 10420121 T G); (4039 10421326 A G); (4040 10421328 T C); (4041
10421390 G A); (4042 10421404 C T); (4043 10421409 G A); (4044 10421424 T C); (4045 10421568 C
T); (4046 10421599 C T); (4047 10422004 G A); (4048 10422902 A G); (4049 10423405 T G); (4050
10423857 T C); (4051 10424291 T C); (4052 10425223 A G); (4053 10425270 C T); (4054 10425701 T
A); (4055 10426081 G A); (4056 10426095 GA G); (4057 10426730 C T); (4058 10428005 C T); (4059
10436122 C G); (4060 10437179 T C); (4061 10437489 C G); (4062 10439272 G T); (4063 10447036 G
A); (4064 10448277 G A); (4065 10448314 T C); (4066 10448534 G A); (4067 10449022 C T); (4068
10451605 A G); (4069 10452273 C A); (4070 10452308 G A); (4071 10453224 C T); (4072 10455720 G
A); (4073 10458452 C T); (4074 10465842 G A); (4075 10465845 C T); (4076 10468301 C T); (4077
10468387 T G); (4078 10468435 C CTT); (4079 10468895 TTGTAA T); (4080 10468983 A G); (4081
10470070 T C); (4082 10470395 CTCGA C); (4083 10470473 A G); (4084 10470562 C A); (4085 10473852
T C); (4086 10474643 T G); (4087 10475559 A T); (4088 10476624 T G); (4089 10476872 T C); (4090
10477881 G A); (4091 10477974 A G); (4092 10477991 G A); (4093 10478812 C T); (4094 10479690 T
C); (4095 10479696 G A); (4096 10479697 A G); (4097 10480301 T C); (4098 10480373 A AT); (4099
10481431 G A); (4100 10482118 T G); (4101 10484270 C G); (4102 10487638 CAT C); (4103 10488243 A
G); (4104 10488249 GA G); (4105 10489061 A G); (4106 10489084 G A); (4107 10489920 C G); (4108
10490478 G T); (4109 10490525 ATGATACTCTGTT A); (4110 10490779 A C); (4111 10491525 T C); (4112
10492176 C T); (4113 10492690 T C); (4114 10493398 C T); (4115 10493656 C T); (4116 10493821 G
A); (4117 10495092 T C); (4118 10495358 A T); (4119 10495359 G A); (4120 10495447 C A); (4121
10495450 C T); (4122 10495456 C T); (4123 10496268 G A); (4124 10496287 A G); (4125 10498456 ATG
A); (4126 10499673 T C); (4127 10500050 C T); (4128 10501627 C T); (4129 10501872 T A); (4130
10502028 C T); (4131 10502137 T C); (4132 10502481 C T); (4133 10502512 A G); (4134 10502513 C
A); (4135 10502625 T C); (4136 10502707 C A); (4137 10503620 G A); (4138 10504017 T A); (4139
10504200 G A); (4140 10504222 G A); (4141 10504293 A C); (4142 10504749 T C); (4143 10505004 A
C); (4144 10505042 G A); (4145 10506427 G A); (4146 10507244 A G); (4147 10509643 A G); (4148
10510969 A C); (4149 10511155 G A); (4150 10512521 A G); (4151 10512583 TC T); (4152 10514341 G
A); (4153 10516281 C T); (4154 10516368 C CT); (4155 10518418 A G); (4156 10520090 T C); (4157
10520151 G GAAATACACTA); (4158 10522081 T C); (4159 10522637 A T); (4160 10523561 C A); (4161
10523610 C T); (4162 10523863 C G); (4163 10524909 C A); (4164 10526655 G T); (4165 10526776 A
G); (4166 10527260 C T); (4167 10527280 A G); (4168 10527378 A T); (4169 10527788 T C); (4170
10528202 C T); (4171 10528440 C CAA); (4172 10528449 G T); (4173 10528839 C T); (4174 10529364 C
T); (4175 10529598 A G); (4176 10529626 A G); (4177 10529971 T C); (4178 10530383 C A); (4179
10531424 T C); (4180 10532056 C T); (4181 10532205 G A); (4182 10532696 A G); (4183 10533153 T
C); (4184 10533220 T A); (4185 10533523 A G); (4186 10533635 C T); (4187 10535678 T C); (4188
10535922 A G); (4189 10536595 C T); (4190 10536638 T A); (4191 10539045 G A); (4192 10539234 C
G); (4193 10539519 A G); (4194 10540128 T C); (4195 10540129 C A); (4196 10540216 A G); (4197
10540723 T A); (4198 10540791 G A); (4199 10543650 A G); (4200 10548064 T C); (4201 10548199 CA
C); (4202 10548231 A T); (4203 10560883 A G); (4204 10561098 A C); (4205 10561256 A G); (4206
10563390 ATATTT A); (4207 10563625 A T); (4208 10565407 T A); (4209 10565497 G A); (4210 10565508
G A); (4211 10566534 TGGAAGAAGAACAAGCCTTATATA T); (4212 10568477 T G); (4213 10570278 A
G); (4214 10570501 T C); (4215 10573953 C T); (4216 10574009 T C); (4217 10574016 G A); (4218
10574236 C T); (4219 10574247 G A); (4220 10574541 G T); (4221 10575782 A AT); (4222 10577624 C
T); (4223 10577767 TAG T); (4224 10578506 G A); (4225 10579114 A G); (4226 10579331 G T); (4227
10582958 C G); (4228 10583112 TAA T); (4229 10584154 ATCAATTTT A); (4230 10584306 G A); (4231
10585267 C A); (4232 10585756 T C); (4233 10585935 A G); (4234 10585991 C T); (4235 10586732 C
A); (4236 10587236 GA G); (4237 10588426 T A); (4238 10588442 AT A); (4239 10588918 GA G); (4240
10590143 AAGGAT A); (4241 10590885 T TA); (4242 10591124 G A); (4243 10591138 G A); (4244
10591439 T C); (4245 10591449 C T); (4246 10591668 C T); (4247 10591680 G A); (4248 10592130 A
G); (4249 10592411 G A); (4250 10592719 T C); (4251 10593470 C A); (4252 10593541 A G); (4253
10593698 TG T); (4254 10594094 T C); (4255 10594120 C T); (4256 10594186 C T); (4257 10594277 G
A); (4258 10594586 A G); (4259 10594926 T C); (4260 10594938 G A); (4261 10597198 A G); (4262
10597919 T C); (4263 10598033 T A); (4264 10598144 T C); (4265 10598204 A G); (4266 10598577 C
A); (4267 10599578 GAGA G); (4268 10599678 C T); (4269 10599680 T C); (4270 10599819 C T); (4271
10600865 C T); (4272 10600993 A G); (4273 10602635 G A); (4274 10603936 A G); (4275 10604109 A
AATATATATATAT); (4276 10604359 G A); (4277 10604673 T C); (4278 10608145 A T); (4279 10609909 G
A); (4280 10610607 C T); (4281 10610979 C T); (4282 10611767 A G); (4283 10612518 T C); (4284
10613759 A G); (4285 10614410 GA G); (4286 10614830 T A); (4287 10616025 C T); (4288 10616068 G
T); (4289 10616121 T A); (4290 10616220 A C); (4291 10616294 G A); (4292 10616431 C A); (4293
10616941 C T); (4294 10617879 T A); (4295 10617945 A G); (4296 10619714 A C); (4297 10622675 A
AT); (4298 10623091 A C); (4299 10624032 A G); (4300 10624069 T C); (4301 10624083 G A); (4302
10624147 T C); (4303 10624212 C T); (4304 10624229 G A); (4305 10624295 G T); (4306 10625405 G
A); (4307 10625434 C T); (4308 10625499 C T); (4309 10625625 A G); (4310 10626244 T C); (4311
10626413 A T); (4312 10626487 C G); (4313 10626670 G A); (4314 10626760 C T); (4315 10626788 G
A); (4316 10627025 A T); (4317 10627096 G A); (4318 10627380 G A); (4319 10628018 T C); (4320
10628459 T C); (4321 10628525 A C); (4322 10628882 C A); (4323 10628952 G A); (4324 10629431 A
G); (4325 10629910 G A); (4326 10630625 A G); (4327 10630994 T C); (4328 10631104 A G); (4329
10631190 G A); (4330 10632005 C T); (4331 10632316 C A); (4332 10632633 T C); (4333 10633758 C
T); (4334 10633898 C T); (4335 10634464 A C); (4336 10634869 C T); (4337 10634908 G A); (4338
10635039 AG A); (4339 10635080 A G); (4340 10635113 T C); (4341 10635460 T C); (4342 10635772 T
C); (4343 10636158 A G); (4344 10636926 C G); (4345 10636948 C T); (4346 10637054 G A); (4347
10637095 T C); (4348 10637794 A G); (4349 10637823 A AC); (4350 10637899 G A); (4351 10638053 C
T); (4352 10639076 T C); (4353 10639261 G A); (4354 10639342 G T); (4355 10640014 G A); (4356
10641296 G GT); (4357 10641492 T G); (4358 10641540 A T); (4359 10641541 A T); (4360 10641724 G
A); (4361 10641954 T G); (4362 10642694 T C); (4363 10642765 C T); (4364 10643615 C G); (4365
10643658 G A); (4366 10643681 T G); (4367 10643712 G A); (4368 10643744 G A); (4369 10644057 C
T); (4370 10644078 A G); (4371 10644741 C T); (4372 10644819 G A); (4373 10644937 G A); (4374
10645008 T C); (4375 10645019 C T); (4376 10645215 G A); (4377 10645870 A G); (4378 10645930 G
A); (4379 10646573 C T); (4380 10646666 G A); (4381 10646833 G A); (4382 10646939 T C); (4383
10647700 G A); (4384 10649409 G C); (4385 10650222 T C); (4386 10650574 T C); (4387 10651445 G
A); (4388 10651526 A G); (4389 10651990 C A); (4390 10652030 G A); (4391 10652399 C A); (4392
10652424 G A); (4393 10652850 G C); (4394 10652980 C T); (4395 10653949 G A); (4396 10653959 G
A); (4397 10653990 T C); (4398 10654083 A G); (4399 10654615 C T); (4400 10654841 T C); (4401
10654849 T C); (4402 10655167 C T); (4403 10655247 C G); (4404 10655297 T A); (4405 10655958 T
C); (4406 10656346 G A); (4407 10656901 C A); (4408 10657031 C T); (4409 10657032 A G); (4410
10657166 C T); (4411 10657508 C T); (4412 10657572 C T); (4413 10657669 C T); (4414 10657763 A
T); (4415 10657798 C T); (4416 10657810 C A); (4417 10657894 C T); (4418 10657971 G A); (4419
10658270 C A); (4420 10658327 C T); (4421 10658439 C G); (4422 10658679 G A); (4423 10658985 G
A); (4424 10659284 C T); (4425 10659501 C T); (4426 10660093 G A); (4427 10660395 T C); (4428
10660646 G A); (4429 10660765 C T); (4430 10661228 G A); (4431 10661526 C T); (4432 10661825 A
C); (4433 10661997 C T); (4434 10662422 A ACTT); (4435 10662623 A G); (4436 10662633 A G); (4437
10662702 C T); (4438 10662705 C T); (4439 10663157 G A); (4440 10663371 A G); (4441 10663582 A
G); (4442 10663900 G A); (4443 10664185 G C); (4444 10664543 A C); (4445 10664761 C A); (4446
10665075 C CT); (4447 10665264 T C); (4448 10666331 AATCG A); (4449 10666421 A G); (4450
10667066 G A); (4451 10668027 TAA T); (4452 10668521 G A); (4453 10668522 G A); (4454 10668559 T
C); (4455 10668790 G A); (4456 10668831 A G); (4457 10669378 C T); (4458 10669415 T G); (4459
10669659 T G); (4460 10669665 A G); (4461 10670488 G T); (4462 10670511 T C); (4463 10670730 G
A); (4464 10670900 T C); (4465 10670902 G A); (4466 10671206 T C); (4467 10671400 A AAT); (4468
10671548 C T); (4469 10671698 T G); (4470 10671848 GTT G); (4471 10672536 G T); (4472 10673038 A
C); (4473 10673068 C G); (4474 10673594 G A); (4475 10674057 C T); (4476 10674186 C T); (4477
10675176 G A); (4478 10675503 A C); (4479 10675636 G T); (4480 10676141 C G); (4481 10676196 T
C); (4482 10676368 A C); (4483 10676509 G A); (4484 10676561 C T); (4485 10676574 C T); (4486
10676809 C T); (4487 10676861 G A); (4488 10676897 C A); (4489 10677087 T C); (4490 10677171 C
T); (4491 10677605 C T); (4492 10678436 A AT); (4493 10678548 CA C); (4494 10679340
ATATATATATATATATTTTTTTT A); (4495 10679411 A T); (4496 10679430 G GCAC); (4497 10679591 A
G); (4498 10679659 T TA); (4499 10680842 T C); (4500 10680984 G A); (4501 10681076 C T); (4502
10681126 T C); (4503 10681519 T C); (4504 10681755 A G); (4505 10682293 T G); (4506 10682513 G
A); (4507 10682889 G C); (4508 10683075 A G); (4509 10683130 A G); (4510 10683143 G A); (4511
10683639 G A); (4512 10683880 C T); (4513 10683907 A G); (4514 10683952 T G); (4515 10683954 C
T); (4516 10683989 T C); (4517 10684031 G A); (4518 10684114 A G); (4519 10684149 A G); (4520
10684333 A G); (4521 10684414 G C); (4522 10684518 A G); (4523 10684589 A G); (4524 10684729 T
A); (4525 10684860 G A); (4526 10684959 A C); (4527 10685192 T C); (4528 10685306 G A); (4529
10685568 C T); (4530 10685648 C T); (4531 10685865 C A); (4532 10685985 T C); (4533 10686078 C
T); (4534 10686266 A G); (4535 10686427 C T); (4536 10687088 G A); (4537 10687756 C A); (4538
10688381 G A); (4539 10688506 G GA); (4540 10688733 G T); (4541 10688814 G A); (4542 10688817 G
A); (4543 10688995 C T); (4544 10689039 A G); (4545 10689412 G A); (4546 10689669 T A); (4547
10689877 G A); (4548 10690022 C T); (4549 10690105 G A); (4550 10690129 G A); (4551 10690316 G
A); (4552 10690379 C T); (4553 10690400 T C); (4554 10691006 C T); (4555 10691129 T G); (4556
10691318 G A); (4557 10691825 TA T); (4558 10691928 T A); (4559 10692752 T TA); (4560 10693866 T
A); (4561 10693867 C G); (4562 10693957 AT A); (4563 10694160 A G); (4564 10694213 A C); (4565
10694576 A T); (4566 10694845 C T); (4567 10694897 G A); (4568 10694910 G A); (4569 10695331 G
A); (4570 10695359 GA G); (4571 10695483 C T); (4572 10695517 C T); (4573 10695590 G A); (4574
10695791 CA C); (4575 10696762 C T); (4576 10696816 A G); (4577 10696882 G T); (4578 10697339 A
T); (4579 10697704 C T); (4580 10699543 G C); (4581 10700035 C T); (4582 10700166 C T); (4583
10700678 C T); (4584 10700735 C T); (4585 10701092 C A); (4586 10701309 G C); (4587 10702312 C
A); (4588 10703663 C T); (4589 10703796 C T); (4590 10704071 C T); (4591 10705465 G A); (4592
10706446 T C); (4593 10706607 A T); (4594 10706618 G A); (4595 10706917 C T); (4596 10707225 G
GA); (4597 10707238 G C); (4598 10707270 C T); (4599 10707300 G A); (4600 10707591 C T); (4601
10707798 A G); (4602 10707876 G A); (4603 10708012 TA T); (4604 10708070 A G); (4605 10708075 C
T); (4606 10708148 A G); (4607 10708348 G A); (4608 10708515 C T); (4609 10708559 C T); (4610
10709163 C T); (4611 10709587 G A); (4612 10709788 A C); (4613 10710048 G A); (4614 10710087 C
T); (4615 10710125 G A); (4616 10710138 A G); (4617 10710152 G A); (4618 10710261 T A); (4619
10710583 C T); (4620 10710603 G A); (4621 10710631 G A); (4622 10710772 G A); (4623 10710824 A
G); (4624 10710827 A C); (4625 10710896 A G); (4626 10710942 T TGGGTGATGATGATCCCG); (4627
10710992 A T); (4628 10711049 A G); (4629 10711326 G A); (4630 10711752 G A); (4631 10711753 C
G); (4632 10711834 G A); (4633 10711868 G A); (4634 10711983 T A); (4635 10711998 G A); (4636
10712145 T G); (4637 10712422 C T); (4638 10712434 T G); (4639 10712688 T C); (4640 10713076 C
T); (4641 10713512 C T); (4642 10713719 A T); (4643 10714270 T A); (4644 10714677 G A); (4645
10714742 A G); (4646 10714778 C T); (4647 10715056 C T); (4648 10715148 G T); (4649 10715165 C
T); (4650 10715204 G A); (4651 10715557 A G); (4652 10715673 C T); (4653 10715711 A G); (4654
10715748 G T); (4655 10715767 C G); (4656 10715768 C G); (4657 10716056 T C); (4658 10716097 G
A); (4659 10716141 G T); (4660 10716271 A G); (4661 10716304 A G); (4662 10716463 A G); (4663
10716490 G A); (4664 10716569 G T); (4665 10716595 A G); (4666 10716730 C T); (4667 10716758 T
C); (4668 10716760 C T); (4669 10716769 A G); (4670 10716770 C T); (4671 10716866 C T); (4672
10716954 C T); (4673 10717057 G A); (4674 10717357 A G); (4675 10717492 A G); (4676 10717538 A
G); (4677 10717565 C T); (4678 10717600 A G); (4679 10717648 G A); (4680 10717739 C A); (4681
10717973 G A); (4682 10718017 C T); (4683 10718148 G A); (4684 10718228 C T); (4685 10718284 T
C); (4686 10718319 G A); (4687 10719354 G A); (4688 10719434 C T); (4689 10719532 A G); (4690
10719602 A G); (4691 10719717 A G); (4692 10719831 G A); (4693 10719908 C T); (4694 10719984 A
G); (4695 10720348 T G); (4696 10720480 G A); (4697 10720679 G A); (4698 10720864 C T); (4699
10720972 A C); (4700 10721172 T A); (4701 10721192 T C); (4702 10721333 T C); (4703 10721632 A
G); (4704 10721919 G A); (4705 10722106 A C); (4706 10722260 A C); (4707 10722276 G T); (4708
10722277 C T); (4709 10722303 G A); (4710 10722347 C T); (4711 10722437 C T); (4712 10722766 C
T); (4713 10722792 A G); (4714 10722852 G A); (4715 10722917 A T); (4716 10722986 A G); (4717
10722994 C T); (4718 10723280 G A); (4719 10723281 G T); (4720 10723307 T C); (4721 10723346 A
G); (4722 10723350 C G); (4723 10723417 G A); (4724 10723657 A G); (4725 10723695 G C); (4726
10723937 G A); (4727 10724656 G A); (4728 10724662 C T); (4729 10724896 C A); (4730 10724946 G
A); (4731 10724975 G A); (4732 10725369 A T); (4733 10725386 G A); (4734 10725500 T C); (4735
10725786 TC T); (4736 10726088 A T); (4737 10726105 C T); (4738 10726688 C T); (4739 10726718 T
A); (4740 10726729 G A); (4741 10726738 A G); (4742 10726831 T C); (4743 10726854 G A); (4744
10726903 G A); (4745 10726930 G A); (4746 10726970 C T); (4747 10726976 C T); (4748 10726981 A
G); (4749 10727021 G A); (4750 10727070 T C); (4751 10727113 C G); (4752 10727398 C T); (4753
10727559 ATCT A); (4754 10727588 G A); (4755 10727592 T C); (4756 10728223 C A); (4757 10728347 G
T); (4758 10728495 A G); (4759 10728641 G C); (4760 10730265 A C); (4761 10730742 T C); (4762
10731045 C T); (4763 10731075 C A); (4764 10731185 C T); (4765 10731253 A G); (4766 10731319 C
T); (4767 10731762 T C); (4768 10732655 T C); (4769 10733189 A G); (4770 10733286 A T); (4771
10733779 C T); (4772 10734989 C CTAAT); (4773 10735076 T C); (4774 10735094 T A); (4775 10735142
C T); (4776 10735308 A G); (4777 10735479 T C); (4778 10735513 G A); (4779 10735574 G A); (4780
10735580 T C); (4781 10735772 A G); (4782 10735774 T C); (4783 10735775 G T); (4784 10735895 T
C); (4785 10736077 C G); (4786 10736448 A C); (4787 10737096 T C); (4788 10737579 G C); (4789
10738172 C T); (4790 10738195 C T); (4791 10738508 C T); (4792 10738712 A G); (4793 10738780 C
T); (4794 10738810 C T); (4795 10739001 A C); (4796 10739072 G A); (4797 10739120 T C); (4798
10740057 T C); (4799 10740144 C T); (4800 10740508 C G); (4801 10740708 G A); (4802 10740742 C
A); (4803 10740997 T C); (4804 10741019 C T); (4805 10741047 A C); (4806 10741062 G C); (4807
10741106 A G); (4808 10741177 C T); (4809 10741258 G A); (4810 10741409 A C); (4811 10741512 T
C); (4812 10741744 A G); (4813 10741806 T C); (4814 10742026 C T); (4815 10742040 G A); (4816
10742148 G A); (4817 10742577 C T); (4818 10742799 A G); (4819 10742935 A G); (4820 10742980 G
C); (4821 10743117 C T); (4822 10743146 T A); (4823 10743183 G A); (4824 10743190 T C); (4825
10743205 C T); (4826 10743364 C G); (4827 10743871 C T); (4828 10743978 A G); (4829 10744069 G
A); (4830 10744310 G A); (4831 10744959 T C); (4832 10745059 C A); (4833 10745436 A AC); (4834
10745503 C T); (4835 10745654 G C); (4836 10745746 C T); (4837 10746173 G A); (4838 10746261 A
C); (4839 10746415 C T); (4840 10746558 G A); (4841 10746814 C T); (4842 10746974 T C); (4843
10747143 C T); (4844 10747198 T C); (4845 10747422 A C); (4846 10747505 G A); (4847 10747523 T
C); (4848 10747724 C A); (4849 10747930 T C); (4850 10747999 G A); (4851 10748099 G A); (4852
10748194 A G); (4853 10748204 C G); (4854 10748250 T C); (4855 10748374 G A); (4856 10748407 G
A); (4857 10748497 C T); (4858 10748839 C T); (4859 10749126 A G); (4860 10749214 TG T); (4861
10749274 G A); (4862 10749539 C T); (4863 10749743 C G); (4864 10749817 C A); (4865 10749874 C
T); (4866 10750088 T C); (4867 10750296 C T); (4868 10750325 C T); (4869 10750540 C T); (4870
10750678 T C); (4871 10750718 T A); (4872 10750849 G C); (4873 10750856 T G); (4874 10750857 C
A); (4875 10750860 C A); (4876 10750868 G A); (4877 10750906 C T); (4878 10751079 T G); (4879
10751099 G A); (4880 10751154 G A); (4881 10751172 A C); (4882 10751188 G A); (4883 10751202 C
T); (4884 10751211 A C); (4885 10751325 C T); (4886 10751328 A G); (4887 10751337 C G); (4888
10751448 C T); (4889 10751556 A C); (4890 10751661 G A); (4891 10752545 C G); (4892 10752827 C
T); (4893 10753178 C T); (4894 10753196 G A); (4895 10753231 C T); (4896 10753269 A G); (4897
10753291 T TG); (4898 10753588 A C); (4899 10753949 A G); (4900 10755910 G A); (4901 10757494 C
T); (4902 10757664 A G); (4903 10758482 G T); (4904 10758510 A G); (4905 10758823 C T); (4906
10758848 C T); (4907 10758857 G C); (4908 10758885 A C); (4909 10760046 A G); (4910 10760229 A
C); (4911 10760268 C T); (4912 10760276 T C); (4913 10760297 A G); (4914 10760593 G A); (4915
10760614 A G); (4916 10760705 C T); (4917 10760726 C T); (4918 10760905 A G); (4919 10761349 A
G); (4920 10761671 T C); (4921 10761708 T C); (4922 10761772 A G); (4923 10761864 T C); (4924
10761865 G T); (4925 10761869 C G); (4926 10761895 TTGTCTTTGTTGTATCTGAGTTG T); (4927
10761902 T C); (4928 10761995 C T); (4929 10762001 C T); (4930 10762087 A G); (4931 10762093 A
G); (4932 10762113 C T); (4933 10762157 G A); (4934 10762224 C T); (4935 10762462 C T); (4936
10762572 T G); (4937 10762933 A G); (4938 10763067 G A); (4939 10763128 C A); (4940 10763145 T
C); (4941 10763165 C A); (4942 10763362 C T); (4943 10763875 G A); (4944 10763950 G A); (4945
10764095 G T); (4946 10764104 G T); (4947 10764344 C CT); (4948 10764728 G A); (4949 10764898 C
T); (4950 10765034 G A); (4951 10765408 T A); (4952 10765540 G A); (4953 10766489 G T); (4954
10766499 G T); (4955 10767550 C A); (4956 10767805 T A); (4957 10768139 G A); (4958 10769189 G
T); (4959 10769828 A T); (4960 10769832 TA T); (4961 10769845 T C); (4962 10769850 A T); (4963
10769986 A AGTC); (4964 10770037 A AT); (4965 10770048 A G); (4966 10770240 A C); (4967 10770375
C T); (4968 10770607 C T); (4969 10770652 G A); (4970 10770751 G GT); (4971 10770778 T C); (4972
10770802 C G); (4973 10770941 C T); (4974 10771086 T A); (4975 10771167 A G); (4976 10771258 G
A); (4977 10771693 G A); (4978 10771905 C T); (4979 10771992 C T); (4980 10772066 G A); (4981
10772398 T C); (4982 10774019 C T); (4983 10774658 A G); (4984 10774720 T G); (4985 10774737 A
G); (4986 10775080 TTC T); (4987 10775639 A T); (4988 10775872 C A); (4989 10776492 A G); (4990
10776652 G A); (4991 10776674 A ATT); (4992 10776760 G A); (4993 10777065 C T); (4994 10778779 C
A); (4995 10778951 C T); (4996 10779397 C T); (4997 10779591 C T); (4998 10779924 G A); (4999
10781323 A T); (5000 10781352 TA T); (5001 10781403 A G); (5002 10781569 T G); (5003 10781978 C
T); (5004 10782461 G A); (5005 10782654 G T); (5006 10782656 A C); (5007 10782691 T C); (5008
10782862 G GA); (5009 10783878 G A); (5010 10784260 C CTTTTCTTTTATCTTATTTT); (5011 10784973 G
T); (5012 10785003 C T); (5013 10785008 A G); (5014 10785097 C T); (5015 10785121 T C); (5016
10785517 A G); (5017 10786371 C T); (5018 10786586 G A); (5019 10787179 T C); (5020 10787341 A
T); (5021 10787352 C T); (5022 10787442 G A); (5023 10787562 G A); (5024 10787878 G A); (5025
10788151 G A); (5026 10788318 G T); (5027 10789583 G A); (5028 10789892 G A); (5029 10789947 C
T); (5030 10790147 A T); (5031 10790401 A G); (5032 10790910 C T); (5033 10791059 A G); (5034
10791213 G A); (5035 10791310 T C); (5036 10791380 T A); (5037 10791401 G A); (5038 10791494 C
T); (5039 10791507 C T); (5040 10791555 T C); (5041 10791581 G A); (5042 10791767 C T); (5043
10793312 C A); (5044 10793343 C G); (5045 10793427 A G); (5046 10793446 A G); (5047 10793476 A
C); (5048 10793479 T G); (5049 10793486 G T); (5050 10793487 T A); (5051 10793497 G A); (5052
10793499 A G); (5053 10793507 A G); (5054 10793596 C A); (5055 10793797 A T); (5056 10793805 G
T); (5057 10793823 A G); (5058 10793828 G A); (5059 10793829 T G); (5060 10796648 TG T); (5061
10798090 G A); (5062 10798512 A G); (5063 10799081 T C); (5064 10804074 T G); (5065 10804264 C
T); (5066 10804366 GT G); (5067 10804367 T C); (5068 10805745 G C); (5069 10805944 A C); (5070
10805963 T A); (5071 10806224 C T); (5072 10806294 G A); (5073 10807195 A T); (5074 10807197 G
GACTTGGTCCATGCCGAAT); (5075 10807380 A G); (5076 10807467 A G); (5077 10808141 C G); (5078
10808243 G T); (5079 10808562 C T); (5080 10808756 T C); (5081 10809134 G A); (5082 10809630 C
T); (5083 10809634 A G); (5084 10809781 A G); (5085 10809837 T C); (5086 10809939 G A); (5087
10810147 T C); (5088 10811973 G T); (5089 10812074 T C); (5090 10812201 C T); (5091 10812309 G
A); (5092 10812350 C T); (5093 10812449 G A); (5094 10812477 A G); (5095 10812907 A G); (5096
10813051 T C); (5097 10813303 C T); (5098 10813592 C T); (5099 10813850 C T); (5100 10813985 T
C); (5101 10814222 A G); (5102 10815126 G A); (5103 10815190 C T); (5104 10815242 T TCTTTTC); (5105
10815598 G A); (5106 10815620 C T); (5107 10816252 C G); (5108 10817292 G C); (5109 10817592 G
A); (5110 10817624 G A); (5111 10817703 T C); (5112 10817883 T C); (5113 10818106 C T); (5114
10818549 G T); (5115 10818591 C A); (5116 10819847 C A); (5117 10819853 G A); (5118 10820187 C
T); (5119 10820375 AT A); (5120 10822204 C T); (5121 10822896 G A); (5122 10823141 C T); (5123
10823256 C T); (5124 10823279 G A); (5125 10823605 C T); (5126 10823640 G A); (5127 10823737 A
G); (5128 10823913 T A); (5129 10823931 C T); (5130 10824574 G GT); (5131 10824717 C T); (5132
10824823 C T); (5133 10825068 G A); (5134 10825244 T C); (5135 10825247 G A); (5136 10826331 G
A); (5137 10826593 C T); (5138 10826600 G A); (5139 10826715 C T); (5140 10828353 G A); (5141
10828414 C T); (5142 10828508 G A); (5143 10829215 A G); (5144 10830347 C A); (5145 10831333 C
T); (5146 10831409 A G); (5147 10831433 C T); (5148 10831533 C T); (5149 10832017 C T); (5150
10832133 C T); (5151 10832260 C T); (5152 10832300 G A); (5153 10832550 T C); (5154 10832584 G
A); (5155 10833393 T C); (5156 10833575 G A); (5157 10833609 A G); (5158 10834108 C T); (5159
10834339 C A); (5160 10834376 T C); (5161 10834589 C CT); (5162 10834770 G A); (5163 10835184 C
T); (5164 10835276 C A); (5165 10835888 G A); (5166 10837791 T TA); (5167 10838232 A G); (5168
10840073 CTTA C); (5169 10840542 C T); (5170 10841146 T C); (5171 10841244 G A); (5172 10841287 C
T); (5173 10841351 C T); (5174 10841521 A G); (5175 10841552 A G); (5176 10841832 C T); (5177
10842004 G A); (5178 10842294 A G); (5179 10843136 G A); (5180 10844045 T G); (5181 10844929 G
A); (5182 10845102 T C); (5183 10845880 C T); (5184 10846061 T G); (5185 10846449 C T); (5186
10847991 A T); (5187 10848664 T G); (5188 10849715 C G); (5189 10850945 T C); (5190 10850956 A
G); (5191 10851072 A T); (5192 10851113 A T); (5193 10851161 C T); (5194 10851710 G A); (5195
10851725 G A); (5196 10851986 G A); (5197 10851987 C T); (5198 10852013 C T); (5199 10852201 A
T); (5200 10852345 G A); (5201 10852745 T C); (5202 10853085 A AT); (5203 10853364 C T); (5204
10854404 G A); (5205 10855281 TA T); (5206 10855466 T A); (5207 10855549 G A); (5208 10855609 G
T); (5209 10855610 A T); (5210 10855767 TACTAAGTAAAACA T); (5211 10855813 A C); (5212 10857622
C T); (5213 10857663 C A); (5214 10857911 T TA); (5215 10857990 C A); (5216 10858044 G A); (5217
10858096 CA C); (5218 10858115 G A); (5219 10858146 C T); (5220 10858455 G C); (5221 10858657 T
G); (5222 10858732 C G); (5223 10858960 G A); (5224 10858971 C T); (5225 10858994 T C); (5226
10858998 G C); (5227 10859013 A G); (5228 10859015 T A); (5229 10859047 C T); (5230 10859067 C
T); (5231 10859117 C T); (5232 10859304 A G); (5233 10859330 C T); (5234 10859573 G T); (5235
10859687 T A); (5236 10859744 T TA); (5237 10859755 G A); (5238 10859870 A T); (5239 10860117 A
G); (5240 10860118 G T); (5241 10860132 T C); (5242 10860174 G A); (5243 10860253 G A); (5244
10860318 G A); (5245 10861973 A G); (5246 10862100 C T); (5247 10864436 C
CTACCTCACTTCACA); (5248 10864540 C A); (5249 10864643 G C); (5250 10864648 C T); (5251 10864926
C T); (5252 10864980 A G); (5253 10865113 A T); (5254 10865224 T C); (5255 10865229 A T); (5256
10865787 CAA C); (5257 10865949 G A); (5258 10865950 T G); (5259 10865974 T G); (5260 10866142 C
T); (5261 10866171 G A); (5262 10866239 A G); (5263 10866240 C T); (5264 10866246 G T); (5265
10866262 C A); (5266 10866349 T C); (5267 10866403 G A); (5268 10866419 C T); (5269 10866483 G
C); (5270 10866493 A G); (5271 10866856 C T); (5272 10867054 C T); (5273 10867072 C G); (5274
10867158 G A); (5275 10867232 T G); (5276 10867286 G A); (5277 10867294 C T); (5278 10867366 A
G); (5279 10867536 G A); (5280 10867767 C T); (5281 10867843 T C); (5282 10867920 T C); (5283
10867950 C T); (5284 10868018 A G); (5285 10868149 T C); (5286 10868154 G T); (5287 10868159 G
T); (5288 10868268 G A); (5289 10868360 A G); (5290 10868494 A G); (5291 10868535 C T); (5292
10868596 C A); (5293 10868663 C T); (5294 10869105 G A); (5295 10869130 G C); (5296 10869162 C
A); (5297 10869254 G A); (5298 10869377 G A); (5299 10869519 AG A); (5300 10869763 A G); (5301
10869789 C T); (5302 10869844 C T); (5303 10870180 A C); (5304 10871113 G A); (5305 10871240 T
C); (5306 10872895 C T); (5307 10872960 C T); (5308 10873039 C T); (5309 10873081 A G); (5310
10873095 C A); (5311 10873096 T C); (5312 10873343 T A); (5313 10873458 C T); (5314 10873473 A
AT); (5315 10873526 A T); (5316 10873640 C A); (5317 10874212 T C); (5318 10874227 C G); (5319
10874231 A G); (5320 10874265 C T); (5321 10874721 A G); (5322 10874770 C G); (5323 10874789 C
T); (5324 10874964 A G); (5325 10874998 A AT); (5326 10875027 C T); (5327 10875079 G A); (5328
10875110 C T); (5329 10875131 AT A); (5330 10875143 C CA); (5331 10875181 C T); (5332 10875235 G
T); (5333 10875321 A AT); (5334 10875562 G T); (5335 10875603 G A); (5336 10877412 T G); (5337
10877475 AAGTTGTTTTACTT A); (5338 10877918 T C); (5339 10877930 G A); (5340 10877948 G
A); (5341 10878077 A G); (5342 10878106 C T); (5343 10878185 T C); (5344 10878213 T C); (5345
10878287 A G); (5346 10878438 T A); (5347 10878862 T G); (5348 10879412 T A); (5349 10879649 C
A); (5350 10879720 A G); (5351 10879760 G C); (5352 10879908 TTATA T); (5353 10879979 A T); (5354
10880001 A T); (5355 10880169 TA T); (5356 10880254 C T); (5357 10880260 T
TGACATGACATTGTAGG); (5358 10880271 A T); (5359 10880313 G A); (5360 10880321 T G); (5361
10880324 T G); (5362 10880369 C T); (5363 10880384 T G); (5364 10880408 T A); (5365 10880415 C
CTG); (5366 10880425 T A); (5367 10880427 A G); (5368 10880470 A G); (5369 10880521 G T); (5370
10880528 T A); (5371 10880576 G T); (5372 10880684 A G); (5373 10880948 T G); (5374 10881334 G
C); (5375 10881474 A G); (5376 10881586 T C); (5377 10881749 C A); (5378 10881948 A C); (5379
10882677 A G); (5380 10882680 A G); (5381 10882689 T C); (5382 10882748 A G); (5383 10882896 C
T); (5384 10883000 G A); (5385 10883201 A G); (5386 10883324 T G); (5387 10883383 C T); (5388
10883517 G A); (5389 10883522 A G); (5390 10883705 G A); (5391 10883799 G A); (5392 10884172 T
G); (5393 10884726 A G); (5394 10884777 C T); (5395 10884863 T C); (5396 10884981 A T); (5397
10885127 A G); (5398 10885728 C T); (5399 10885790 T C); (5400 10886248 A C); (5401 10886413 G
A); (5402 10886487 G A); (5403 10886492 C T); (5404 10886511 A G); (5405 10886596 T A); (5406
10886940 T C); (5407 10886943 T G); (5408 10887031 A T); (5409 10887143 G A); (5410 10887273 C
T); (5411 10887310 T A); (5412 10887714 G A); (5413 10887793 A T); (5414 10888087 G A); (5415
10888214 G C); (5416 10888410 A G); (5417 10888600 GTTAA G); (5418 10888926 A G); (5419 10888969
AC A); (5420 10888977 C T); (5421 10888992 G T); (5422 10889065 G A); (5423 10889084 T A); (5424
10889113 G A); (5425 10889159 C T); (5426 10889446 G A); (5427 10889546 T C); (5428 10889678 G
A); (5429 10889822 T C); (5430 10890713 T C); (5431 10890738 T C); (5432 10890748 A G); (5433
10890772 C T); (5434 10890849 G A); (5435 10890850 T C); (5436 10891235 T TCAC); (5437 10891278 G
A); (5438 10891290 G A); (5439 10891302 G T); (5440 10891439 G A); (5441 10891598 A G); (5442
10891612 T C); (5443 10891971 A G); (5444 10892161 A G); (5445 10892215 C A); (5446 10892326 G
A); (5447 10892592 C A); (5448 10892612 C T); (5449 10892621 T C); (5450 10892735 A G); (5451
10892762 G T); (5452 10892843 C T); (5453 10892926 C T); (5454 10892960 T C); (5455 10892975 A
G); (5456 10892980 T C); (5457 10892981 A G); (5458 10893019 A G); (5459 10893511 G A); (5460
10893534 C T); (5461 10893575 C G); (5462 10893674 T C); (5463 10893729 A G); (5464 10893805 T
C); (5465 10893843 C T); (5466 10893953 A G); (5467 10894331 C T); (5468 10894360 C T); (5469
10894397 A G); (5470 10894447 A T); (5471 10894471 G A); (5472 10894706 A G); (5473 10894735 C
T); (5474 10895565 G C); (5475 10896318 T C); (5476 10896342 T A); (5477 10896393 A G); (5478
10896505 G T); (5479 10896525 C T); (5480 10896660 C A); (5481 10896782 G A); (5482 10896885 A
G); (5483 10896953 T C); (5484 10897118 G A); (5485 10897141 C T); (5486 10897273 C T); (5487
10897308 T C); (5488 10897360 C T); (5489 10897366 T G); (5490 10897413 C T); (5491 10897819 T
G); (5492 10897920 C T); (5493 10897940 C A); (5494 10897970 A T); (5495 10898131 T C); (5496
10898292 A C); (5497 10898310 G A); (5498 10898313 T C); (5499 10898315 A G); (5500 10898494 A
G); (5501 10898970 C T); (5502 10899045 T C); (5503 10899052 T G); (5504 10899054 G A); (5505
10899057 TA T); (5506 10899144 T C); (5507 10899212 G A); (5508 10899257 T C); (5509 10899300 T
C); (5510 10899626 G A); (5511 10899731 G C); (5512 10899818 G C); (5513 10899830 G A); (5514
10899854 T C); (5515 10899907 G GC); (5516 10900401 T A); (5517 10900632 A C); (5518 10900689 A
G); (5519 10900757 A T); (5520 10900818 A G); (5521 10900835 A G); (5522 10900894 A T); (5523
10900929 A G); (5524 10901117 G A); (5525 10901191 T C); (5526 10901306 T C); (5527 10901307 G
A); (5528 10901318 T A); (5529 10901330 A G); (5530 10901364 G A); (5531 10901384 T G); (5532
10901416 G T); (5533 10901551 G A); (5534 10901605 T C); (5535 10901620 T C); (5536 10901649 G
A); (5537 10901910 A G); (5538 10901913 T C); (5539 10901923 G A); (5540 10901952 A T); (5541
10902151 T C); (5542 10902249 C G); (5543 10902368 A G); (5544 10902387 C T); (5545 10902559 T
C); (5546 10902613 G T); (5547 10902678 T G); (5548 10902795 A G); (5549 10902899 T C); (5550
10902904 G A); (5551 10902929 AC A); (5552 10902957 G A); (5553 10902980 C T); (5554 10903066 C
T); (5555 10903103 T C); (5556 10903112 T C); (5557 10903174 G A); (5558 10903185 C T); (5559
10903236 C A); (5560 10903286 C T); (5561 10903321 G A); (5562 10903885 A G); (5563 10903900 T
C); (5564 10903996 G C); (5565 10904010 T C); (5566 10904043 T A); (5567 10904080 C T); (5568
10904595 G C); (5569 10905122 G T); (5570 10905156 A G); (5571 10905187 ATC A); (5572 10905324
GA G); (5573 10905540 T C); (5574 10905840 C T); (5575 10906084 T TC); (5576 10906401 G C); (5577
10906552 T C); (5578 10906674 T C); (5579 10906721 AACT A); (5580 10907123 G T); (5581 10907161 C
T); (5582 10907207 A C); (5583 10907220 G A); (5584 10907270 A AT); (5585 10907493 A G); (5586
10907544 C T); (5587 10907547 G A); (5588 10907595 T C); (5589 10907665 T A); (5590 10907666 T
A); (5591 10907684 T C); (5592 10907795 C T); (5593 10907830 T C); (5594 10907844 G A); (5595
10907888 T C); (5596 10907913 A G); (5597 10907918 A G); (5598 10907978 A C); (5599 10908073 C
A); (5600 10908106 C T); (5601 10908254 T C); (5602 10908417 T A); (5603 10909125 A G); (5604
10909216 G T); (5605 10909270 C T); (5606 10909272 T C); (5607 10909303 A C); (5608 10909794 A
G); (5609 10909819 G A); (5610 10909821 T C); (5611 10909843 A G); (5612 10909863 C T); (5613
10909899 C T); (5614 10910214 T C); (5615 10910352 A T); (5616 10910362 A G); (5617 10910434 T
A); (5618 10911047 G A); (5619 10911230 A C); (5620 10911459 G A); (5621 10911637 G C); (5622
10911701 C T); (5623 10911740 C T); (5624 10911800 A C); (5625 10911950 A C); (5626 10912005 T
C); (5627 10912169 T C); (5628 10912222 G A); (5629 10912268 A G); (5630 10912546 C
CGATGAATTATTTTCCATTGTCT); (5631 10912548 C G); (5632 10912549 C A); (5633 10912597 T C); (5634
10912601 A G); (5635 10912604 G A); (5636 10912606 A G); (5637 10912616 C T); (5638 10912634 G
A); (5639 10912676 G A); (5640 10912696 T C); (5641 10912761 T C); (5642 10912852 A G); (5643
10912999 C T); (5644 10913137 C T); (5645 10913212 C T); (5646 10913332 G T); (5647 10913337 G
T); (5648 10913416 T C); (5649 10913475 T G); (5650 10913477 T C); (5651 10913528 C T); (5652
10913653 A T); (5653 10913666 A G); (5654 10914119 G A); (5655 10914529 T C); (5656 10914545 T
G); (5657 10914553 T C); (5658 10915247 T G); (5659 10915269 G A); (5660 10915348 G A); (5661
10915375 T C); (5662 10915416 G T); (5663 10915461 G A); (5664 10915513 A G); (5665 10915555 A
G); (5666 10915585 A G); (5667 10915624 C T); (5668 10915637 A G); (5669 10915672 G C); (5670
10915678 G C); (5671 10915705 C T); (5672 10915846 T A); (5673 10915859 A G); (5674 10915902 T
G); (5675 10916088 G A); (5676 10916166 T C); (5677 10916224 G A); (5678 10916276 C T); (5679
10916300 C T); (5680 10916320 C T); (5681 10916326 G A); (5682 10916338 G T); (5683 10916401 G
A); (5684 10916442 C T); (5685 10916501 G A); (5686 10916502 A C); (5687 10916518 G A); (5688
10916521 A G); (5689 10916549 T C); (5690 10916595 C G); (5691 10916602 T C); (5692 10916617 A
G); (5693 10916626 T C); (5694 10916660 G T); (5695 10916662 T C); (5696 10916765 C T); (5697
10916775 G A); (5698 10916813 C T); (5699 10916850 G T); (5700 10916852 A C); (5701 10916866 T
C); (5702 10917034 T C); (5703 10917071 C G); (5704 10917078 G A); (5705 10917122 A G); (5706
10917141 G A); (5707 10917163 C G); (5708 10917195 A G); (5709 10917208 T A); (5710 10917285 G
A); (5711 10917290 A G); (5712 10917292 C T); (5713 10917388 T A); (5714 10917405 G A); (5715
10917523 A G); (5716 10917531 C T); (5717 10917542 T C); (5718 10917569 T C); (5719 10917590 A
G); (5720 10917620 A G); (5721 10917661 A G); (5722 10917677 T C); (5723 10917697 A G); (5724
10917708 T C); (5725 10917721 A G); (5726 10917732 T G); (5727 10917733 G C); (5728 10917744 T
C); (5729 10917765 T C); (5730 10917853 G A); (5731 10917884 T C); (5732 10917915 T G); (5733
10917962 A G); (5734 10918309 G A); (5735 10918448 G T); (5736 10918559 G A); (5737 10918732 T
A); (5738 10918748 A T); (5739 10918783 G A); (5740 10918820 T C); (5741 10919233 A C); (5742
10919480 A C); (5743 10919552 A G); (5744 10920209 TA T); (5745 10920379 C A); (5746 10920492 C
A); (5747 10921864 A T); (5748 10922082 A G); (5749 10923110 T A); (5750 10923113 A T); (5751
10923465 C CAG); (5752 10924016 G C); (5753 10924441 T TA); (5754 10924947 T C); (5755 10925658 G
A); (5756 10925801 C T); (5757 10926264 C T); (5758 10926550 C T); (5759 10926551 A G); (5760
10926571 A T); (5761 10928276 G A); (5762 10928638 T C); (5763 10928839 G A); (5764 10929962 T
G); (5765 10930200 G A); (5766 10930639 G A); (5767 10930769 A G); (5768 10930976 T C); (5769
10931246 AT A); (5770 10931338 G A); (5771 10931347 C T); (5772 10931423 T C); (5773 10931778 A
G); (5774 10932060 C T); (5775 10932128 T A); (5776 10932204 CA C); (5777 10932553 T G); (5778
10933030 C T); (5779 10933110 C T); (5780 10933253 G A); (5781 10933390 G C); (5782 10933445 T
C); (5783 10933479 G A); (5784 10933810 A G); (5785 10934159 A G); (5786 10934300 T G); (5787
10934380 A G); (5788 10934420 C CG); (5789 10934485 G A); (5790 10935252 A C); (5791 10935310 C
T); (5792 10935949 T G); (5793 10935958 A G); (5794 10936169 G T); (5795 10936616 G A); (5796
10937639 T G); (5797 10938028 C T); (5798 10938045 G A); (5799 10938471 G A); (5800 10938574 A
G); (5801 10939492 T G); (5802 10939828 G A); (5803 10939839 C G); (5804 10939979 G A); (5805
10940016 C T); (5806 10940020 G A); (5807 10940192 C T); (5808 10940205 A G); (5809 10940381 C
T); (5810 10940561 C T); (5811 10940628 T G); (5812 10940800 A G); (5813 10941155 T C); (5814
10941560 G A); (5815 10941597 C T); (5816 10941629 C T); (5817 10942470 C T); (5818 10942886 G
A); (5819 10943050 C T); (5820 10943076 G T); (5821 10943170 C T); (5822 10943423 T C); (5823
10943506 G GTA); (5824 10943546 C G); (5825 10943667 G A); (5826 10944441 C A); (5827 10945102 T
C); (5828 10945732 C T); (5829 10946097 C T); (5830 10946459 C T); (5831 10946700 A G); (5832
10946818 A T); (5833 10947714 C CT); (5834 10947789 C T); (5835 10948117 CA C); (5836 10948931 C
A); (5837 10948974 C T); (5838 10949267 A C); (5839 10949434 G T); (5840 10949594 C T); (5841
10949657 G T); (5842 10950073 A G); (5843 10950083 G A); (5844 10950168 T C); (5845 10951752 T
G); (5846 10951974 G A); (5847 10952005 G A); (5848 10952390 G T); (5849 10952697 A T); (5850
10954623 G A); (5851 10956316 G C); (5852 10957399 C T); (5853 10958677 CT C); (5854 10958876 C
CT); (5855 10959154 T C); (5856 10959743 A G); (5857 10960104 CAG C); (5858 10960770 C T); (5859
10960997 A AAC); (5860 10961033 C T); (5861 10961133 C G); (5862 10961138 T C); (5863 10961155 A
G); (5864 10961176 T C); (5865 10961238 C T); (5866 10961688 T A); (5867 10961942 C T); (5868
10962279 C T); (5869 10962449 G A); (5870 10962477 G A); (5871 10962520 T C); (5872 10962603 G
A); (5873 10962623 C T); (5874 10962697 T A); (5875 10963127 T C); (5876 10963173 G C); (5877
10963350 A G); (5878 10963597 G C); (5879 10963852 G A); (5880 10964006 C CTATT); (5881 10964727
A T); (5882 10964744 G A); (5883 10965873 T G); (5884 10966748 G A); (5885 10967208 G T); (5886
10967260 T C); (5887 10967585 C T); (5888 10967724 G A); (5889 10968866 A AT); (5890 10969061 T
A); (5891 10970097 G A); (5892 10971348 T C); (5893 10971364 G T); (5894 10971380 T G); (5895
10971436 C A); (5896 10971548 T TA); (5897 10972163 A AT); (5898 10972280 A T); (5899 10972356 C
G); (5900 10972779 T TATG); (5901 10973623 G A); (5902 10973730 G A); (5903 10973756 T C); (5904
10973767 T C); (5905 10973772 G A); (5906 10973800 C G); (5907 10973871 A G); (5908 10973944 C
T); (5909 10973956 A C); (5910 10974007 T C); (5911 10974020 C A); (5912 10974081 T C); (5913
10974088 G C); (5914 10974252 C T); (5915 10974288 A AGT); (5916 10974397 C T); (5917 10974426 G
A); (5918 10974463 G A); (5919 10974498 A G); (5920 10974560 C T); (5921 10974639 A G); (5922
10974815 G A); (5923 10975225 A T); (5924 10975444 T C); (5925 10975610 AT A); (5926 10975818 A
AT); (5927 10976802 A T); (5928 10976819 A AGC); (5929 10976918 T C); (5930 10977017 T C); (5931
10977248 C T); (5932 10977302 T C); (5933 10977303 C T); (5934 10977319 G A); (5935 10977424 T
A); (5936 10977524 A T); (5937 10977557 A G); (5938 10977583 T TAA); (5939 10977694 C T); (5940
10977840 A G); (5941 10977856 T C); (5942 10977946 T C); (5943 10978070 GT G); (5944 10978310 A
G); (5945 10978493 G A); (5946 10978504 G A); (5947 10978674 G A); (5948 10978691 G A); (5949
10978699 T C); (5950 10978791 T C); (5951 10978972 T C); (5952 10979302 T A); (5953 10979667 G
A); (5954 10979814 A AG); (5955 10980015 T A); (5956 10980193 T C); (5957 10980369 A T); (5958
10980384 T C); (5959 10980462 G T); (5960 10980583 G A); (5961 10980673 A T); (5962 10980911 G
A); (5963 10981080 T C); (5964 10981112 A G); (5965 10981118 G C); (5966 10981241 C A); (5967
10981484 A T); (5968 10982123 A C); (5969 10982259 G C); (5970 10982402 A T); (5971 10982412 A
G); (5972 10982417 G A); (5973 10982519 T G); (5974 10982555 C T); (5975 10982588 G C); (5976
10982669 C T); (5977 10982675 C T); (5978 10982706 A G); (5979 10982832 G A); (5980 10983931 A
G); (5981 10984107 A G); (5982 10984214 T A); (5983 10984224 A C); (5984 10985123 A C); (5985
10985179 G A); (5986 10985191 G A); (5987 10985201 T C); (5988 10985310 A G); (5989 10985341 T
C); (5990 10985612 T C); (5991 10985891 A G); (5992 10985901 C T); (5993 10985914 G C); (5994
10985990 A C); (5995 10987015 C T); (5996 10987202 T C); (5997 10987380 T G); (5998 10987397 G
A); (5999 10987446 C T); (6000 10987490 C T); (6001 10987564 TA T); (6002 10987797 A G); (6003
10989394 T G); (6004 10989528 G A); (6005 10989543 C T); (6006 10990051 G C); (6007 10991111 C
T); (6008 10991141 G C); (6009 10991157 A G); (6010 10991508 G A); (6011 10991652 G A); (6012
10992023 T C); (6013 10992166 C T); (6014 10992290 T C); (6015 10992333 A G); (6016 10992861 A
G); (6017 10992908 C A); (6018 10993386 C T); (6019 10993532 G A); (6020 10993535 G T); (6021
10993574 C T); (6022 10993629 G T); (6023 10993630 A T); (6024 10993684 G A); (6025 10993767 C
A); (6026 10993823 G T); (6027 10994274 C A); (6028 10994330 A C); (6029 10994405 C T); (6030
10994442 G C); (6031 10994540 A G); (6032 10994573 G A); (6033 10994792 T G); (6034 10995483 C
T); (6035 10995596 C G); (6036 10995607 G A); (6037 10995621 T C); (6038 10996046 T G); (6039
10996086 G T); (6040 10996196 T C); (6041 10996229 G A); (6042 10997183 A C); (6043 10997224 A
G); (6044 10997239 A G); (6045 10997272 GA G); (6046 10997454 T G); (6047 10997747 T C); (6048
10997968 G T); (6049 10997997 A G); (6050 10998057 T C); (6051 10998222 A G); (6052 10998404
GTGA G); (6053 10998438 A G); (6054 10999189 T G); (6055 10999199 A G); (6056 10999218 T C); (6057
10999299 T C); (6058 10999348 G A); (6059 10999501 G A); (6060 11000193 C T); (6061 11000312 C
T); (6062 11000338 G A); (6063 11000651 A G); (6064 11001127 C T); (6065 11001573 A T); (6066
11001641 T C); (6067 11001786 A T); (6068 11001949 T C); (6069 11002106 A G); (6070 11002492 A
G); (6071 11002586 A G); (6072 11002746 T TAAG); (6073 11003231 A T); (6074 11003611 T G); (6075
11003859 G C); (6076 11003886 GC G); (6077 11003991 A T); (6078 11004326 A G); (6079 11004341 G
A); (6080 11004513 G A); (6081 11005349 C T); (6082 11005753 T C); (6083 11006103 T C); (6084
11006142 A C); (6085 11006143 T A); (6086 11006149 T C); (6087 11006336 A T); (6088 11006417 T
G); (6089 11006454 C A); (6090 11006458 T A); (6091 11006539 C T); (6092 11006785 A G); (6093
11006811 C T); (6094 11006839 G A); (6095 11007246 A G); (6096 11007306 G A); (6097 11010436 C
T); (6098 11010641 C G); (6099 11010841 C T); (6100 11011054 T C); (6101 11011685 G A); (6102
11011746 G A); (6103 11012206 G A); (6104 11012340 A C); (6105 11012463 C T); (6106 11012508 GT
G); (6107 11012709 C G); (6108 11012947 A G); (6109 11013141 A G); (6110 11013173 G A); (6111
11013222 G A); (6112 11013391 G A); (6113 11013628 C T); (6114 11013849 A G); (6115 11014227 A
C); (6116 11014298 T TA); (6117 11014374 G A); (6118 11014517 C T); (6119 11014763 G A); (6120
11015388 T C); (6121 11016087 G A); (6122 11016978 C T); (6123 11017058 A G); (6124 11017106 C
T); (6125 11017572 A G); (6126 11017637 T C); (6127 11017882 A G); (6128 11017971 C A); (6129
11018108 G A); (6130 11018446 C A); (6131 11018735 T G); (6132 11018840 A G); (6133 11019254 G
A); (6134 11019351 T C); (6135 11019453 G A); (6136 11019457 C T); (6137 11019512 G A); (6138
11019699 C T); (6139 11019718 C G); (6140 11019803 C T); (6141 11019916 C T); (6142 11020165 T
G); (6143 11020179 C T); (6144 11020276 C T); (6145 11020376 G C); (6146 11020407 C T); (6147
11020836 A G); (6148 11021043 A G); (6149 11021265 G A); (6150 11021278 A G); (6151 11021336 A
C); (6152 11021429 G T); (6153 11021449 T G); (6154 11022093 A G); (6155 11022514 G A); (6156
11022517 A C); (6157 11023094 G A); (6158 11023227 A C); (6159 11023406 C T); (6160 11023584 T
G); (6161 11023669 C G); (6162 11023746 AC A); (6163 11023771 T C); (6164 11023964 A C); (6165
11024140 C T); (6166 11024300 G A); (6167 11024308 T A); (6168 11024336 C T); (6169 11024374 T
C); (6170 11024388 C T); (6171 11024677 G C); (6172 11024697 A G); (6173 11024934 C A); (6174
11025139 A AT); (6175 11025143 A G); (6176 11025477 C T); (6177 11026543 A T); (6178 11026675 T
C); (6179 11027859 C T); (6180 11028026 G GA); (6181 11028289 T A); (6182 11028292 A
ATACAT); (6183 11028535 G A); (6184 11028693 T C); (6185 11028705 A C); (6186 11028986 A G); (6187
11029123 A AT); (6188 11029738 T G); (6189 11029890 T G); (6190 11030105 A G); (6191 11030559 A
G); (6192 11030844 G A); (6193 11030848 G A); (6194 11030848 GTA G); (6195 11030852 A G); (6196
11031848 A T); (6197 11031963 A G); (6198 11032694 A G); (6199 11032970 T C); (6200 11033172 T
G); (6201 11033921 A G); (6202 11033968 A G); (6203 11034076 T A); (6204 11034110 G GA); (6205
11034186 A G); (6206 11034219 C T); (6207 11034259 T C); (6208 11034313 A G); (6209 11034656 G
A); (6210 11034725 C G); (6211 11035055 T C); (6212 11035546 T C); (6213 11035746 C T); (6214
11035911 C A); (6215 11035970 CT C); (6216 11036101 C CAA); (6217 11036177 C T); (6218 11036353 A
T); (6219 11036443 T C); (6220 11036499 G A); (6221 11036522 C T); (6222 11036582 G A); (6223
11036675 A G); (6224 11036896 T C); (6225 11037674 T C); (6226 11037736 T C); (6227 11038393 A
T); (6228 11038514 A C); (6229 11038801 T G); (6230 11040589 CGAATGATGGAGAA C); (6231 11040756
T A); (6232 11040935 G GTTGTCAATATTTATTCTTGTT); (6233 11041227 G A); (6234 11041486 G
A); (6235 11041511 G A); (6236 11041735 T C); (6237 11041833 C T); (6238 11041892 T C); (6239
11042361 G A); (6240 11043633 A G); (6241 11044825 G A); (6242 11044936 C T); (6243 11045092 G
A); (6244 11045268 T TACTTACAGATCTTATGTA); (6245 11045901 C A); (6246 11045972 A T); (6247
11046146 C T); (6248 11046874 A G); (6249 11047350 A G); (6250 11047427 A G); (6251 11047785 A
AT); (6252 11047878 T A); (6253 11048007 C T); (6254 11048191 G A); (6255 11049022 G C); (6256
11049401 A G); (6257 11049497 A G); (6258 11049601 G A); (6259 11049667 T C); (6260 11049695 C
T); (6261 11049811 G A); (6262 11049921 T A); (6263 11049936 A AAAG); (6264 11049971 C A); (6265
11050240 T A); (6266 11050342 AT A); (6267 11050690 G A); (6268 11051362 C T); (6269 11051560 C
T); (6270 11052643 A T); (6271 11052741 A G); (6272 11052912 T G); (6273 11052989 C T); (6274
11053036 T A); (6275 11053102 C T); (6276 11053176 G A); (6277 11053277 T C); (6278 11053349 G
A); (6279 11053452 T C); (6280 11053648 C T); (6281 11053926 G C); (6282 11053982 A G); (6283
11054064 T C); (6284 11054159 G A); (6285 11054254 AAG A); (6286 11054585 C T); (6287 11054775 C
T); (6288 11054818 T C); (6289 11055217 T TA); (6290 11055254 A G); (6291 11055713 A T); (6292
11055735 G A); (6293 11056136 G A); (6294 11056502 G C); (6295 11056717 T C); (6296 11056754 A
G); (6297 11057102 GT G); (6298 11057157 C T); (6299 11057937 G C); (6300 11058057 G A); (6301
11058634 AC A); (6302 11058738 A T); (6303 11059118 C T); (6304 11059216 T G); (6305 11059243 A
G); (6306 11059334 G A); (6307 11059450 G T); (6308 11059836 C T); (6309 11059939 A C); (6310
11059943 T G); (6311 11060579 A AT); (6312 11061036 A T); (6313 11063547 T A); (6314 11064065 T
A); (6315 11064120 G C); (6316 11065185 C T); (6317 11065578 G A); (6318 11065822 G A); (6319
11066085 T C); (6320 11067270 A C); (6321 11067500 A G); (6322 11067974 T C); (6323 11069622 C
T); (6324 11069699 G GGGCA); (6325 11069782 G C); (6326 11070504 C T); (6327 11070883 C T); (6328
11070911 A G); (6329 11071345 T C); (6330 11072006 C T); (6331 11072269 A T); (6332 11072517 A
G); (6333 11073525 T G); (6334 11074398 A G); (6335 11074955 G A); (6336 11075092 C G); (6337
11075225 G A); (6338 11076726 G A); (6339 11077741 A G); (6340 11079616 C T); (6341 11084514 C
T); (6342 11084521 T C); (6343 11084566 A G); (6344 11084883 T C); (6345 11085982 G A); (6346
11086010 A G); (6347 11086058 G C); (6348 11086121 T G); (6349 11086312 C A); (6350 11086318 G
A); (6351 11086330 G A); (6352 11086335 T C); (6353 11086357 C T); (6354 11086367 G A); (6355
11086369 C A); (6356 11086382 C G); (6357 11086387 C T); (6358 11086406 C T); (6359 11086408 G
A); (6360 11086423 A G); (6361 11086512 G GTGCACATACAAAGATGATTCT); (6362 11086520 C A); (6363
11086524 T C); (6364 11086539 T C); (6365 11086559 C T); (6366 11086570 TA T); (6367 11086584 C
T); (6368 11086616 T C); (6369 11086650 G A); (6370 11086711 T C); (6371 11086729 G A); (6372
11086894 G A); (6373 11087216 A G); (6374 11087426 A C); (6375 11087452 A G); (6376 11087466 C
T); (6377 11087505 C T); (6378 11087861 A G); (6379 11087946 T G); (6380 11088045 G A); (6381
11088099 T C); (6382 11088222 T G); (6383 11088385 G T); (6384 11088454 G A); (6385 11088484 C
T); (6386 11088879 T C); (6387 11088904 T A); (6388 11089083 T C); (6389 11089298 C T); (6390
11089351 G A); (6391 11089529 C A); (6392 11089600 A G); (6393 11089784 T C); (6394 11089805 G
A); (6395 11089971 GGA G); (6396 11090507 G A); (6397 11090860 T C); (6398 11090866 C T); (6399
11090889 C T); (6400 11091364 T C); (6401 11091390 C T); (6402 11091414 C T); (6403 11091452 C
T); (6404 11091616 G A); (6405 11091662 A T); (6406 11091877 G A); (6407 11091907 G A); (6408
11092347 T A); (6409 11092425 TA T); (6410 11093414 C G); (6411 11094044 AGAAAAAG A); (6412
11094154 A G); (6413 11095022 G A); (6414 11095900 C T); (6415 11096228 C G); (6416 11096309 A
C); (6417 11096314 T A); (6418 11096609 C A); (6419 11096987 G C); (6420 11097150 GT G); (6421
11097262 A T); (6422 11097359 G A); (6423 11097488 C A); (6424 11098028 G T); (6425 11098217 T
G); (6426 11098253 T TA); (6427 11098658 G GT); (6428 11099085 G C); (6429 11099133 C A); (6430
11099670 C T); (6431 11099951 C T); (6432 11100122 C T); (6433 11100671 A G); (6434 11101252 G
C); (6435 11101331 T C); (6436 11102290 A C); (6437 11103535 A G); (6438 11103900 G T); (6439
11104265 G A); (6440 11104908 A G); (6441 11105794 G A); (6442 11106330 A G); (6443 11106452 C
T); (6444 11106514 G A); (6445 11106634 T C); (6446 11107177 T C); (6447 11107255 T G); (6448
11107554 A C); (6449 11108202 A G); (6450 11108291 C T); (6451 11108317 C G); (6452 11108796 A
G); (6453 11108834 T C); (6454 11108942 A G); (6455 11108956 A G); (6456 11109021 T C); (6457
11109262 T G); (6458 11110838 T A); (6459 11111038 C A); (6460 11111514 C T); (6461 11112122 A
AAAT); (6462 11112303 AC A); (6463 11112486 T TA); (6464 11112600 T TATA); (6465 11113539 T
G); (6466 11113671 A C); (6467 11114474 T C); (6468 11115052 G A); (6469 11115447 A G); (6470
11115560 T C); (6471 11115984 G A); (6472 11116096 C T); (6473 11116685 A G); (6474 11117596 T
C); (6475 11117987 G A); (6476 11118382 T A); (6477 11118454 C T); (6478 11118828 T G); (6479
11118836 C T); (6480 11118856 T C); (6481 11118909 T C); (6482 11118926 G A); (6483 11118950 G
A); (6484 11118956 G A); (6485 11118975 A T); (6486 11118983 C T); (6487 11119199 C T); (6488
11120642 AT A); (6489 11121216 G A); (6490 11121276 A G); (6491 11121860 A G); (6492 11122319 TG
T); (6493 11124348 C T); (6494 11124508 G A); (6495 11124620 G A); (6496 11124636 C G); (6497
11124693 G C); (6498 11124694 C G); (6499 11124717 C T); (6500 11124958 T TCA); (6501 11126821 A
T); (6502 11126885 A C); (6503 11127087 T G); (6504 11127141 A G); (6505 11127830 G A); (6506
11127979 G GT); (6507 11128159 A T); (6508 11128485 C T); (6509 11128685 T C); (6510 11129873 T
TA); (6511 11130278 GA TG); (6512 11130280 T A); (6513 11130317 TA T); (6514 11130459 C A); (6515
11130562 A AATATAT); (6516 11130687 A G); (6517 11130840 CA C); (6518 11131707 T TA); (6519
11132024 TTTC T); (6520 11132028 T C); (6521 11132076 A G); (6522 11132093 G A); (6523 11132131 A
G); (6524 11132143 C T); (6525 11132204 G A); (6526 11132225 G A); (6527 11132814 T C); (6528
11133003 A G); (6529 11133039 T A); (6530 11133087 G A); (6531 11133097 A T); (6532 11133180 A
G); (6533 11133286 G A); (6534 11133358 G GGTTCTGGGCGTGACCAGTCATGCCCA); (6535 11133558 G
A); (6536 11133654 T A); (6537 11133782 C T); (6538 11133825 C T); (6539 11134058 A C); (6540
11134317 G A); (6541 11134977 C CA); (6542 11137543 T TA); (6543 11137599 T C); (6544 11137675 TA
T); (6545 11138353 A T); (6546 11138354 A T); (6547 11138847 A G); (6548 11139091 TA T); (6549
11139536 G A); (6550 11140109 A AT); (6551 11141067 T C); (6552 11141184 AT A); (6553 11141274 T
G); (6554 11141557 A T); (6555 11141650 C A); (6556 11143173 A G); (6557 11145012 T G); (6558
11145535 C CA); (6559 11145573 A G); (6560 11145655 A G); (6561 11145801 G A); (6562 11145898 C
A); (6563 11146173 C T); (6564 11146297 C T); (6565 11146372 T C); (6566 11146443 G T); (6567
11146447 G A); (6568 11146517 T C); (6569 11146598 C G); (6570 11146643 C A); (6571 11146719 A
T); (6572 11146812 C T); (6573 11146821 C A); (6574 11146828 G C); (6575 11146837 A C); (6576
11146873 T A); (6577 11146891 T C); (6578 11147195 A T); (6579 11147319 A G); (6580 11147402 G
C); (6581 11147487 T C); (6582 11147713 C T); (6583 11147825 T A); (6584 11147835 T A); (6585
11147837 A T); (6586 11147844 AATAC A); (6587 11147848 A T); (6588 11147936 T G); (6589 11147946
A C); (6590 11147948 CT C); (6591 11147968 T C); (6592 11147989 T C); (6593 11148013 G C); (6594
11148105 T C); (6595 11148212 C CTA); (6596 11148304 T A); (6597 11148347 CTCA C); (6598 11148394
C T); (6599 11148416 C T); (6600 11148454 T A); (6601 11148546 T C); (6602 11148557 C T); (6603
11148692 C T); (6604 11148707 G T); (6605 11148713 A G); (6606 11148740 A G); (6607 11148780 G
C); (6608 11148785 A T); (6609 11148789 A G); (6610 11148839 C A); (6611 11148853 A G); (6612
11148880 T G); (6613 11148894 C G); (6614 11149005 GA G); (6615 11149023 A G); (6616 11149228 C
T); (6617 11149324 A G); (6618 11149389 CA C); (6619 11149435 A T); (6620 11149472 T C); (6621
11149563 G A); (6622 11149564 G T); (6623 11149634 A ATAAAT); (6624 11149724 T TCATG); (6625
11149807 G A); (6626 11149853 A T); (6627 11149981 A G); (6628 11150069 C A); (6629 11150082 C
T); (6630 11150134 G A); (6631 11150142 A ATCT); (6632 11150220 A C); (6633 11150340 C T); (6634
11150517 G A); (6635 11150552 CAT C); (6636 11150771 G C); (6637 11150939 A C); (6638 11151016 A
T); (6639 11151208 T A); (6640 11151332 G A); (6641 11151369 T C); (6642 11151593 C A); (6643
11151594 A C); (6644 11151667 T TTTTAATAATA); (6645 11151845 C T); (6646 11151857 A AT); (6647
11151953 A T); (6648 11152013 C T); (6649 11152017 A G); (6650 11152020 C A); (6651 11152056 G
T); (6652 11152089 A AT); (6653 11152138 A G); (6654 11152149 T C); (6655 11152197 G A); (6656
11153178 T A); (6657 11153255 T A); (6658 11153306 T TGGATACTGG); (6659 11153364 GAA G); (6660
11153406 C T); (6661 11153796 A ATTG); (6662 11153886 C T); (6663 11153911 C T); (6664 11153925 G
T); (6665 11153950 C A); (6666 11154009 T C); (6667 11154012 A T); (6668 11154078 C G); (6669
11154182 A T); (6670 11154236 AT A); (6671 11154362 CA C); (6672 11154603 C G); (6673 11154670 C
G); (6674 11154791 G A); (6675 11154849 T TA); (6676 11154881 C T); (6677 11154941 A C); (6678
11154988 C T); (6679 11155153 C A); (6680 11155231 C T); (6681 11155282 C T); (6682 11155292 G
GA); (6683 11155556 GTCTT G); (6684 11155568 G A); (6685 11155571 G A); (6686 11155576 A C); (6687
11155582 T G); (6688 11155643 A G); (6689 11155719 G T); (6690 11155731 G A); (6691 11155736 T
A); (6692 11155746 T C); (6693 11155752 T C); (6694 11155794 T TTA); (6695 11155804 T C); (6696
11155883 C T); (6697 11155930 T G); (6698 11156053 T A); (6699 11156054 T C); (6700 11156058 A
T); (6701 11156067 T C); (6702 11156231 C T); (6703 11156273 T C); (6704 11156298 T G); (6705
11156305 A T); (6706 11156311 A T); (6707 11156456 G A); (6708 11156600 G T); (6709 11156748 G
A); (6710 11156903 T C); (6711 11156939 G A); (6712 11159380 A G); (6713 11159407 T C); (6714
11159410 A G); (6715 11159440 G A); (6716 11159575 A G); (6717 11159949 T C); (6718 11160688 C
T); (6719 11160690 T C); (6720 11160759 C T); (6721 11160774 G T); (6722 11160777 T C); (6723
11160789 A G); (6724 11160798 G A); (6725 11160810 C T); (6726 11160813 C T); (6727 11161558 T
A); (6728 11161587 G A); (6729 11161591 T C); (6730 11161756 G A); (6731 11161760 A G); (6732
11161761 G A); (6733 11162729 G A); (6734 11162738 G A); (6735 11162792 A G); (6736 11162804 A
G); (6737 11162837 A G); (6738 11162840 G A); (6739 11164767 G A); (6740 11165057 T C); (6741
11165061 T A); (6742 11165066 G A); (6743 11165343 C T); (6744 11165409 T C); (6745 11165480 A
G); (6746 11165502 A G); (6747 11165951 T C); (6748 11166007 G C); (6749 11166017 C T); (6750
11167428 T C); (6751 11167431 C T); (6752 11167452 C T); (6753 11168140 T C); (6754 11168169 G
A); (6755 11168342 T G); (6756 11168574 T A); (6757 11168736 A T); (6758 11168801 A ATT); (6759
11168940 C T); (6760 11168985 C T); (6761 11169070 AACGACAT A); (6762 11169073 A G); (6763
11169199 A G); (6764 11169253 G A); (6765 11169265 T G); (6766 11169412 CAA C); (6767 11169521 G
A); (6768 11169558 T C); (6769 11169602 C A); (6770 11169671 T C); (6771 11169791 G A); (6772
11169795 T A); (6773 11169891 T TA); (6774 11170075 C T); (6775 11170516 T C); (6776 11170520 A
G); (6777 11170749 T C); (6778 11170805 T G); (6779 11170847 C T); (6780 11171094 G A); (6781
11171124 T C); (6782 11171143 T C); (6783 11171315 C T); (6784 11171364 C T); (6785 11171396 T
C); (6786 11171419 G A); (6787 11171424 T C); (6788 11171439 G A); (6789 11171440 T C); (6790
11171441 G A); (6791 11171452 C T); (6792 11171515 T A); (6793 11171520 G
GCCACACCCCACGCGACCCGCA); (6794 11171528 T C); (6795 11171563 T C); (6796 11171571 G A); (6797
11171573 G A); (6798 11171622 GATCCGCGCCAGATCTC G); (6799 11171624 A G); (6800 11171880 G
A); (6801 11171899 A G); (6802 11171999 C T); (6803 11172063 C T); (6804 11172126 T C); (6805
11172217 C T); (6806 11172248 A G); (6807 11172266 T C); (6808 11172280 T C); (6809 11172340 A
C); (6810 11172412 G A); (6811 11172522 G T); (6812 11172582 T C); (6813 11172625 A G); (6814
11172886 G A); (6815 11172893 T C); (6816 11172922 C T); (6817 11172923 A G); (6818 11172925 C
T); (6819 11173041 A G); (6820 11173064 G A); (6821 11173128 A G); (6822 11173238 T C); (6823
11173249 A G); (6824 11173321 G A); (6825 11173368 A G); (6826 11173382 G A); (6827 11173390 C
T); (6828 11173407 A G); (6829 11173417 C T); (6830 11173451 G A); (6831 11173610 A C); (6832
11173632 C A); (6833 11173708 G A); (6834 11173712 A C); (6835 11173737 A T); (6836 11173757 G
A); (6837 11173760 T C); (6838 11173774 T C); (6839 11173794 G A); (6840 11173892 C T); (6841
11173929 C T); (6842 11173997 AC A); (6843 11174060 T C); (6844 11174123 C T); (6845 11174208 C
T); (6846 11174215 T C); (6847 11174230 T G); (6848 11174265 C T); (6849 11174324 A T); (6850
11174393 A G); (6851 11174396 T C); (6852 11174433 A G); (6853 11174486 C T); (6854 11174500 G
A); (6855 11174526 G A); (6856 11174549 T C); (6857 11174568 A C); (6858 11174585 C T); (6859
11174587 G C); (6860 11174640 G C); (6861 11174809 C G); (6862 11174900 C A); (6863 11175056 T
TAA); (6864 11175346 G T); (6865 11175366 T G); (6866 11175708 T A); (6867 11175716 C T); (6868
11175980 CTTGATAA C); (6869 11176082 T TA); (6870 11176122 C T); (6871 11176139 T C); (6872
11176177 A G); (6873 11176198 T C); (6874 11176221 G T); (6875 11176229 T C); (6876 11176235 G
A); (6877 11176359 C T); (6878 11176376 T C); (6879 11176381 C T); (6880 11176426 T C); (6881
11176451 TA T); (6882 11176724 A G); (6883 11176727 C T); (6884 11176775 G A); (6885 11176795 A
C); (6886 11176820 A T); (6887 11176868 G T); (6888 11179975 G A); (6889 11182427 G C); (6890
11184301 C G); (6891 11187456 C T); (6892 11187731 T C); (6893 11189940 G A); (6894 11190913 G
T); (6895 11192205 A G); (6896 11192623 T C); (6897 11193267 G T); (6898 11194149 T C); (6899
11194267 A G); (6900 11196000 T C); (6901 11199054 C T); (6902 11199997 C T); (6903 11200230 C
T); (6904 11204201 C G); (6905 11204316 C G); (6906 11205960 C T); (6907 11206012 T C); (6908
11206255 C A); (6909 11206969 T C); (6910 11208285 C T); (6911 11208792 C A); (6912 11213151 G
T); (6913 11213923 T G); (6914 11214031 T C); (6915 11214045 C A); (6916 11214613 G A); (6917
11222229 CT C); (6918 11222989 T TTA); (6919 11223236 A T); (6920 11224654 G T); (6921 11232861 C
T); (6922 11233265 ATTTG A); (6923 11235140 T G); (6924 11237623 G A); (6925 11238382 A
AGAATT); (6926 11238602 C T); (6927 11239189 AT A); (6928 11240062 C CAATT); (6929 11245425 G
A); (6930 11248668 G A); (6931 11250396 C T); (6932 11259504 C A); (6933 11259746 C T); (6934
11262160 G A); (6935 11262504 C T); (6936 11263748 G C); (6937 11264607 G C); (6938 11264723 G
A); (6939 11265269 C T); (6940 11266531 A G); (6941 11268476 CT C); (6942 11272869 C T); (6943
11273636 G T); (6944 11275077 T A); (6945 11275996 A T); (6946 11276441 C T); (6947 11276682 A
G); (6948 11276972 C T); (6949 11284233 G C); (6950 11285211 C G); (6951 11292810 T C); (6952
11294172 C T); (6953 11295067 G A); (6954 11296445 G A); (6955 11298325 ATT A); (6956 11300916 C
A); (6957 11304912 A C); (6958 11308169 G A); (6959 11310319 C T); (6960 11313483 C T); (6961
11313631 C T); (6962 11317267 G A); (6963 11317499 G A); (6964 11317523 T C); (6965 11326616 G
A); (6966 11327699 G A); (6967 11328788 G A); (6968 11331497 AT A); (6969 11344519 C T); (6970
11349758 G A); (6971 11350811 G A); (6972 11353236 C T); (6973 11356557 G A); (6974 11360321 C
T); (6975 11364893 C CT); (6976 11365604 C A); (6977 11366044 A C); (6978 11366146 C T); (6979
11367015 GT G); (6980 11367278 G A); (6981 11373930 T G); (6982 11375730 T A); (6983 11377911 GT
G); (6984 11382090 A G); (6985 11382733 C T); (6986 11383132 C T); (6987 11384237 A C); (6988
11386745 T C); (6989 11388076 A T); (6990 11388762 G C); (6991 11390287 C T); (6992 11391526 T
C); (6993 11393111 G A); (6994 11395102 A G); (6995 11395350 A G); (6996 11395943 G A); (6997
11396356 T C); (6998 11397964 T G); (6999 11398374 C T); (7000 11398544 G A); (7001 11398617 C
T); (7002 11400424 T A); (7003 11400735 A G); (7004 11401048 A C); (7005 11401654 A G); (7006
11401763 C G); (7007 11403394 A G); (7008 11407301 G A); (7009 11409203 G A); (7010 11410756 C
G); (7011 11411203 T C); (7012 11411595 A G); (7013 11411824 A G); (7014 11412400 CATAT C); (7015
11412602 A C); (7016 11412623 GACTCTTGTTCCCAAACCTAA G); (7017 11415980 G A); (7018 11416627
AT A); (7019 11418901 G A); (7020 11419488 T C); (7021 11421713 C T); (7022 11421970 C G); (7023
11422046 G C); (7024 11427270 T C); (7025 11431446 C A); (7026 11434473 C T); (7027 11436127 A
G); (7028 11436183 C CT); (7029 11440881 T C); (7030 11443551 T TA); (7031 11447065 C T); (7032
11450464 C T); (7033 11451021 C T); (7034 11451149 G A); (7035 11451834 G A); (7036 11452446 T
C); (7037 11456001 ATTT A); (7038 11461621 CA C); (7039 11462713 G C); (7040 11462743 C A); (7041
11462761 C T); (7042 11463273 G A); (7043 11465948 G A); (7044 11468213 A G); (7045 11469344 C
T); (7046 11470514 T C); (7047 11473346 T C); (7048 11475022 C T); (7049 11476005 G T); (7050
11477811 T C); (7051 11477851 G A); (7052 11480220 A C); (7053 11481113 AGTTAT A); (7054
11484242 A C); (7055 11485290 A G); (7056 11485836 A T); (7057 11485996 A G); (7058 11487159 C
T); (7059 11491950 A T); (7060 11494622 C A); (7061 11495213 G C); (7062 11497739 G A); (7063
11502363 C T); (7064 11505998 T C); (7065 11506265 T C); (7066 11508191 A G); (7067 11511062 T
TACAACA); (7068 11511305 C A); (7069 11511310 C A); (7070 11512366 T A); (7071 11513744 A
C); (7072 11514035 AT A); (7073 11514532 G C); (7074 11514931 T C); (7075 11516365 C T); (7076
11517130 C T); (7077 11517709 C G); (7078 11520201 A G); (7079 11520584 C T); (7080 11522522 A
G); (7081 11524612 G A); (7082 11524730 C T); (7083 11525304 G A); (7084 11525635 C T); (7085
11526549 A G); (7086 11527556 C A); (7087 11527680 G A); (7088 11527856 C T); (7089 11528229 T
C); (7090 11528259 T C); (7091 11530067 GT G); (7092 11530107 T C); (7093 11534016 T G); (7094
11536596 TA T); (7095 11541271 A G); (7096 11542888 TA T); (7097 11543667 C G); (7098 11544531 C
G); (7099 11545884 T C); (7100 11546074 G C); (7101 11546920 G A); (7102 11550920 C T); (7103
11552781 G T); (7104 11561120 C T); (7105 11561183 G A); (7106 11567081 G A); (7107 11567209 C
T); (7108 11567635 GC G); (7109 11568082 G A); (7110 11568600 G A); (7111 11568858 C G); (7112
11569054 G A); (7113 11570697 C T); (7114 11573565 C T); (7115 11579396 C T); (7116 11580900 C
T); (7117 11582112 C T); (7118 11584309 C T); (7119 11585407 G A); (7120 11586054 T C); (7121
11587470 A G); (7122 11589839 T G); (7123 11589981 G A); (7124 11593127 G C); (7125 11597777 C
T); (7126 11599987 T C); (7127 11600050 A G); (7128 11600122 C T); (7129 11600146 C A); (7130
11600153 C T); (7131 11600154 T C); (7132 11600165 G T); (7133 11600166 A C); (7134 11600172 T
TTA); (7135 11600175 A G); (7136 11600177 G A); (7137 11601009 T A); (7138 11601033 CA C); (7139
11601045 C T); (7140 11601415 C T); (7141 11601457 G A); (7142 11602226 G A); (7143 11602254 A
G); (7144 11603012 T C); (7145 11603673 C T); (7146 11603676 A G); (7147 11603682 C T); (7148
11603708 C A); (7149 11603714 C T); (7150 11603730 T TG); (7151 11604060 GC G); (7152 11604123 A
C); (7153 11604127 G A); (7154 11604762 A T); (7155 11604773 C T); (7156 11604810 C G); (7157
11608430 T C); (7158 11608734 C A); (7159 11610300 C T); (7160 11610964 C T); (7161 11614303 T
G); (7162 11615932 TTTGGTACTGGA T); (7163 11616028 G A); (7164 11620381 C T); (7165 11621400 A
G); (7166 11622176 C T); (7167 11623132 A G); (7168 11623588 A G); (7169 11623687 C T); (7170
11624220 TAAA T); (7171 11624823 G A); (7172 11625018 G A); (7173 11625032 T G); (7174 11626313 C
T); (7175 11626459 T C); (7176 11626763 T C); (7177 11628798 C G); (7178 11629519 A C); (7179
11629543 A G); (7180 11629676 A G); (7181 11629766 A G); (7182 11629771 A G); (7183 11630102 C
G); (7184 11630148 A G); (7185 11630321 T C); (7186 11630465 A G); (7187 11630744 T A); (7188
11631000 C A); (7189 11631960 T C); (7190 11632183 T G); (7191 11632730 T C); (7192 11632778 T
C); (7193 11633022 G A); (7194 11633068 C G); (7195 11633151 C T); (7196 11633333 T C); (7197
11633381 T C); (7198 11633403 T C); (7199 11633467 T C); (7200 11633645 T G); (7201 11635262 T
C); (7202 11636264 A G); (7203 11636485 G A); (7204 11636696 C A); (7205 11637063 C A); (7206
11638039 A T); (7207 11638076 C T); (7208 11638141 T C); (7209 11638176 A T); (7210 11638195 A
G); (7211 11638269 C T); (7212 11638371 G A); (7213 11638393 A T); (7214 11638459 A G); (7215
11638562 C A); (7216 11641302 C T); (7217 11641835 G A); (7218 11641876 T C); (7219 11641930 C
T); (7220 11642048 T A); (7221 11642070 T C); (7222 11642105 G A); (7223 11642110 A G); (7224
11642118 C T); (7225 11642241 C T); (7226 11642255 T G); (7227 11642307 T C); (7228 11642948 C
T); (7229 11642963 C T); (7230 11643009 C T); (7231 11643040 A G); (7232 11643055 G A); (7233
11643530 A T); (7234 11643681 C A); (7235 11643841 C A); (7236 11644045 A C); (7237 11644053 A
G); (7238 11644056 C A); (7239 11644069 T C); (7240 11644074 A G); (7241 11644081 G A); (7242
11644338 A T); (7243 11644359 T C); (7244 11644433 C T); (7245 11644692 C A); (7246 11644720 C
A); (7247 11644723 T C); (7248 11645214 C T); (7249 11645234 C A); (7250 11645235 T A); (7251
11645236 C A); (7252 11645243 A G); (7253 11645251 A G); (7254 11645295 A T); (7255 11645315 C
T); (7256 11645384 C T); (7257 11645405 T C); (7258 11645422 C T); (7259 11645492 T C); (7260
11645497 A G); (7261 11645498 A G); (7262 11645505 T C); (7263 11645512 T C); (7264 11645535 G
T); (7265 11645537 A C); (7266 11645538 C T); (7267 11645540 C T); (7268 11648316 G A); (7269
11648474 G C); (7270 11648663 G A); (7271 11648854 A G); (7272 11650581 G T); (7273 11650583 C
CTT); (7274 11650940 G A); (7275 11650956 G A); (7276 11651098 A G); (7277 11651245 T C); (7278
11651816 T G); (7279 11652054 C T); (7280 11652129 G A); (7281 11652168 G A); (7282 11652246 A
G); (7283 11654007 T G); (7284 11654442 A G); (7285 11658540 C T); (7286 11659153 GTAA G); (7287
11659166 G C); (7288 11659284 C T); (7289 11659295 T C); (7290 11659401 A C); (7291 11659884 G
A); (7292 11659981 T C); (7293 11660125 T TA); (7294 11660160 G A); (7295 11660346 G A); (7296
11660634 C A); (7297 11660707 A C); (7298 11660709 A T); (7299 11660711 T C); (7300 11661020 C
A); (7301 11661027 CCTAA C); (7302 11661102 G T); (7303 11661184 A G); (7304 11661241 T C); (7305
11661460 C T); (7306 11661562 G C); (7307 11662329 T TA); (7308 11663370 A G); (7309 11663411 C
CATATATATAT); (7310 11663630 C T); (7311 11664033 A AT); (7312 11664304 G A); (7313 11664378 T
G); (7314 11664448 T C); (7315 11664792 A C); (7316 11664797 C G); (7317 11664802 C G); (7318
11666137 G A); (7319 11666699 C G); (7320 11666832 T C); (7321 11666856 GA G); (7322 11666946 A
G); (7323 11666950 C G); (7324 11667153 G GA); (7325 11667358 T A); (7326 11667567 C T); (7327
11667898 G A); (7328 11668395 C T); (7329 11668583 C T); (7330 11668851 G C); (7331 11669657 C
T); (7332 11669715 C T); (7333 11669766 A AC); (7334 11669888 A AC); (7335 11670061 G A); (7336
11670130 A G); (7337 11670141 G A); (7338 11670176 A G); (7339 11670284 C T); (7340 11670356 G
A); (7341 11670368 C A); (7342 11670411 A T); (7343 11670655 A G); (7344 11670859 G A); (7345
11670879 A G); (7346 11670934 T C); (7347 11670999 C A); (7348 11672014 A G); (7349 11672887 A
G); (7350 11674169 C T); (7351 11674193 G A); (7352 11674275 C G); (7353 11674370 T C); (7354
11674462 G A); (7355 11674549 C T); (7356 11674790 G A); (7357 11674795 T G); (7358 11674997 T
C); (7359 11675067 T C); (7360 11675275 C T); (7361 11675291 G
GGCGTGGGAGCCCACGCTTGGA); (7362 11675303 A G); (7363 11675686 T C); (7364 11675729 T
C); (7365 11675802 C T); (7366 11675888 A C); (7367 11675921 G A); (7368 11675965 A G); (7369
11676103 T C); (7370 11676118 G A); (7371 11676534 A C); (7372 11676838 T G); (7373 11676877 A
G); (7374 11677592 A G); (7375 11677618 TAAAACCTTGTTTATC T); (7376 11677628 G A); (7377
11677949 T G); (7378 11678206 T G); (7379 11678412 G A); (7380 11678421 T C); (7381 11678430 C
T); (7382 11678787 A G); (7383 11678894 T G); (7384 11678903 G A); (7385 11679053 C T); (7386
11679567 T G); (7387 11679875 A G); (7388 11680033 T A); (7389 11680137 A G); (7390 11680392 C
T); (7391 11680467 A G); (7392 11680504 G A); (7393 11680625 G A); (7394 11680814 G C); (7395
11680933 C T); (7396 11680964 A C); (7397 11681198 T C); (7398 11681222 A AT); (7399 11681298 G
A); (7400 11681968 G A); (7401 11682012 C T); (7402 11682058 C A); (7403 11682141 T G); (7404
11682755 G T); (7405 11683012 C T); (7406 11683762 C T); (7407 11684349 C T); (7408 11684389 G
A); (7409 11684570 G A); (7410 11684861 C T); (7411 11685079 A C); (7412 11685125 T C); (7413
11685315 G A); (7414 11685422 A G); (7415 11685881 T C); (7416 11685981 T C); (7417 11685993 G
C); (7418 11686048 G A); (7419 11686253 T G); (7420 11686284 A G); (7421 11686369 T C); (7422
11686627 C T); (7423 11687136 T C); (7424 11687205 G T); (7425 11687219 T A); (7426 11687388 C
T); (7427 11687406 T TA); (7428 11687611 T TG); (7429 11687837 T C); (7430 11687919 G A); (7431
11688006 T C); (7432 11688880 T C); (7433 11689220 C A); (7434 11689274 T C); (7435 11689708 A
C); (7436 11689848 G A); (7437 11689944 G C); (7438 11690314 T G); (7439 11690422 A G); (7440
11690837 A T); (7441 11691166 C A); (7442 11691394 A T); (7443 11691459 C A); (7444 11693318 T
A); (7445 11693326 C T); (7446 11693380 C A); (7447 11693405 C A); (7448 11693506 A G); (7449
11693740 C T); (7450 11693748 G T); (7451 11694299 T C); (7452 11694321 A T); (7453 11694409 T
G); (7454 11694466 AT A); (7455 11694507 A C); (7456 11694554 T C); (7457 11694615 A C); (7458
11694667 G A); (7459 11694691 G T); (7460 11694848 A G); (7461 11694955 T C); (7462 11694983 A
G); (7463 11696317 C T); (7464 11696318 A G); (7465 11696455 T C); (7466 11696509 C T); (7467
11696818 G A); (7468 11696925 A C); (7469 11697369 CAA C); (7470 11697555 A G); (7471 11697572 G
A); (7472 11697631 C G); (7473 11697728 C A); (7474 11697876 A G); (7475 11698709 T C); (7476
11698861 T C); (7477 11699469 T A); (7478 11699476 A C); (7479 11699714 G C); (7480 11700099 T
A); (7481 11700132 G A); (7482 11700174 G A); (7483 11700415 A C); (7484 11700504 C T); (7485
11700520 C T); (7486 11700723 T C); (7487 11700815 C G); (7488 11700892 A C); (7489 11700991 C
A); (7490 11701112 G A); (7491 11701962 G A); (7492 11702426 G A); (7493 11702615 T C); (7494
11702847 A AC); (7495 11702853 A T); (7496 11702914 A G); (7497 11703409 A G); (7498 11703544 A
G); (7499 11703653 G T); (7500 11703689 T G); (7501 11703971 A G); (7502 11704070 C G); (7503
11704532 T C); (7504 11704789 G A); (7505 11705003 A G); (7506 11705299 G A); (7507 11705530 C
T); (7508 11705567 G A); (7509 11705693 A C); (7510 11705960 A G); (7511 11706081 C T); (7512
11706126 T C); (7513 11706683 CT C); (7514 11706918 G A); (7515 11707110 T C); (7516 11707119 G
A); (7517 11707139 T A); (7518 11707501 G A); (7519 11707582 T C); (7520 11707774 A T); (7521
11707827 T C); (7522 11708050 C T); (7523 11708113 G A); (7524 11708921 A C); (7525 11709049 T
G); (7526 11709310 G A); (7527 11709334 C T); (7528 11709497 A G); (7529 11709550 A G); (7530
11709562 T C); (7531 11709648 G C); (7532 11710373 C T); (7533 11710384 T C); (7534 11710395 G
GA); (7535 11710450 G A); (7536 11710708 AT A); (7537 11711321 A G); (7538 11711695 A G); (7539
11711706 A G); (7540 11711786 A T); (7541 11711859 G A); (7542 11712940 A G); (7543 11713114 T
C); (7544 11713137 A C); (7545 11713881 A G); (7546 11714530 A G); (7547 11714665 T C); (7548
11714676 A G); (7549 11716291 G A); (7550 11716813 A G); (7551 11717351 G A); (7552 11717594 A
G); (7553 11717742 T C); (7554 11718097 T A); (7555 11718098 T C); (7556 11718449 G A); (7557
11718587 T C); (7558 11718685 A G); (7559 11718793 A G); (7560 11719143 C A); (7561 11719223 A
T); (7562 11719426 G A); (7563 11719725 C T); (7564 11720039 T C); (7565 11720385 C T); (7566
11720393 A C); (7567 11720400 A G); (7568 11720405 T A); (7569 11720421 G A); (7570 11720426 A
G); (7571 11720440 C A); (7572 11720443 A T); (7573 11720742 T A); (7574 11720994 A G); (7575
11721038 G C); (7576 11721090 T C); (7577 11721097 C T); (7578 11721157 A G); (7579 11721478 T
C); (7580 11721480 G A); (7581 11722085 C T); (7582 11722450 TA T); (7583 11722685 A AT); (7584
11722733 A G); (7585 11722973 T C); (7586 11723190 G GA); (7587 11723305 AT A); (7588 11723413 T
TA); (7589 11723552 T A); (7590 11723955 T G); (7591 11724337 T A); (7592 11724513 C T); (7593
11724626 C A); (7594 11724752 G T); (7595 11724775 A G); (7596 11724957 G A); (7597 11725003 G
A); (7598 11725005 A G); (7599 11725007 G A); (7600 11725089 A G); (7601 11725106 G A); (7602
11725116 A C); (7603 11725151 C T); (7604 11725254 A G); (7605 11725303 C T); (7606 11725331 A
G); (7607 11725376 G A); (7608 11725837 A G); (7609 11726075 G A); (7610 11726138 C T); (7611
11726334 G A); (7612 11726450 G A); (7613 11726937 A G); (7614 11727255 A G); (7615 11727296 C
A); (7616 11727317 G A); (7617 11727438 T C); (7618 11727852 A C); (7619 11727972 A C); (7620
11728152 G A); (7621 11728178 G A); (7622 11728419 G GT); (7623 11728743 T C); (7624 11728802 C
G); (7625 11729936 G A); (7626 11729939 G A); (7627 11730242 T G); (7628 11730302 G C); (7629
11730444 C A); (7630 11730585 T C); (7631 11730733 A G); (7632 11730912 C T); (7633 11732528 G
T); (7634 11734841 G A); (7635 11735173 C T); (7636 11735562 A G); (7637 11735599 A G); (7638
11735908 A G); (7639 11735934 A C); (7640 11735955 G A); (7641 11736203 C A); (7642 11736388 T
C); (7643 11736402 A T); (7644 11736747 T C); (7645 11736753 C T); (7646 11736758 C G); (7647
11736861 T G); (7648 11737406 C T); (7649 11737500 C T); (7650 11737591 T C); (7651 11737825 A
C); (7652 11738056 T C); (7653 11738066 A G); (7654 11738277 G C); (7655 11738367 C T); (7656
11738497 A G); (7657 11738923 C T); (7658 11739491 C T); (7659 11739567 G A); (7660 11739641 T
C); (7661 11739690 A G); (7662 11739731 G A); (7663 11739830 G A); (7664 11739847 T C); (7665
11739909 A C); (7666 11740506 T C); (7667 11741011 G A); (7668 11741057 G A); (7669 11741203 G
A); (7670 11741952 T A); (7671 11742099 A G); (7672 11743027 A G); (7673 11743180 G A); (7674
11743260 A T); (7675 11743276 A AG); (7676 11743336 A G); (7677 11743411 T G); (7678 11743478 G
T); (7679 11744724 A G); (7680 11744941 A T); (7681 11745361 G A); (7682 11745363 TG T); (7683
11745794 G A); (7684 11745837 A G); (7685 11746342 C G); (7686 11746461 C A); (7687 11746482 A
G); (7688 11746574 T C); (7689 11746701 C A); (7690 11746974 G T); (7691 11747030 A G); (7692
11747270 T C); (7693 11747337 A G); (7694 11747931 C T); (7695 11749533 T TTA); (7696 11750787 T
G); (7697 11751088 G A); (7698 11751178 G A); (7699 11751561 T G); (7700 11753273 GA G); (7701
11754390 G T); (7702 11754485 G A); (7703 11754779 T TA); (7704 11754905 C T); (7705 11755092 A
C); (7706 11755834 T A); (7707 11756525 C CA); (7708 11756585 T G); (7709 11756714 C G); (7710
11756905 T C); (7711 11757262 T C); (7712 11757439 G A); (7713 11757467 C T); (7714 11757552 C
G); (7715 11757764 C T); (7716 11758021 G A); (7717 11758228 A G); (7718 11758741 G A); (7719
11758796 A G); (7720 11758917 A G); (7721 11758927 C T); (7722 11759081 G A); (7723 11759892 C
T); (7724 11759914 C A); (7725 11764496 G A); (7726 11764509 C T); (7727 11764511 G A); (7728
11764546 T C); (7729 11764556 C T); (7730 11764591 C T); (7731 11764601 T G); (7732 11764607 C
T); (7733 11764631 C A); (7734 11765476 GT G); (7735 11766804 A G); (7736 11766885 A G); (7737
11767134 C T); (7738 11767175 G A); (7739 11767725 T A); (7740 11768103 A C); (7741 11768439 C
T); (7742 11768624 TG T); (7743 11768712 G A); (7744 11768724 G A); (7745 11770286 A C); (7746
11770396 A C); (7747 11771471 C T); (7748 11771502 G C); (7749 11771788 T C); (7750 11772024 T
C); (7751 11772413 T C); (7752 11772445 T C); (7753 11772481 G A); (7754 11772653 G T); (7755
11772917 T C); (7756 11773100 A G); (7757 11773210 A G); (7758 11773807 G A); (7759 11774127 G
A); (7760 11774166 C T); (7761 11774168 C A); (7762 11774223 A T); (7763 11774650 C A); (7764
11775375 C T); (7765 11775384 C A); (7766 11775487 T C); (7767 11775508 G A); (7768 11776059 T
C); (7769 11776520 G A); (7770 11776566 T C); (7771 11782644 G T); (7772 11782666 A G); (7773
11786170 C T); (7774 11786171 T G); (7775 11787095 T C); (7776 11789579 T C); (7777 11789765 C
T); (7778 11789792 C G); (7779 11789866 T A); (7780 11789886 T A); (7781 11790101 G A); (7782
11791082 G A); (7783 11791114 T A); (7784 11793134 C T); (7785 11793137 A G); (7786 11793757 CA
C); (7787 11794154 C T); (7788 11794187 G A); (7789 11794481 A G); (7790 11794494 A C); (7791
11794527 A T); (7792 11794575 T C); (7793 11794580 T C); (7794 11794656 C T); (7795 11795019 G
A); (7796 11795048 T C); (7797 11795812 T C); (7798 11795849 G A); (7799 11795930 T C); (7800
11795939 A G); (7801 11796330 G C); (7802 11796402 G C); (7803 11796486 C T); (7804 11796513 C
T); (7805 11796562 G A); (7806 11796659 G A); (7807 11796697 T A); (7808 11796753 C T); (7809
11796793 G T); (7810 11796798 T C); (7811 11796874 T C); (7812 11797282 G C); (7813 11797297 T
C); (7814 11797851 G A); (7815 11798240 T C); (7816 11798373 C T); (7817 11798500 C A); (7818
11798520 T A); (7819 11798568 A G); (7820 11798618 C T); (7821 11798840 A T); (7822 11798862 G
T); (7823 11798868 T G); (7824 11798869 T A); (7825 11798870 T A); (7826 11798871 T A); (7827
11798888 G A); (7828 11798996 G A); (7829 11799038 C T); (7830 11799168 T C); (7831 11799175 T
C); (7832 11799370 T C); (7833 11799391 G A); (7834 11799415 C G); (7835 11799478 G T); (7836
11800513 A G); (7837 11801071 G T); (7838 11801352 T C); (7839 11801372 GA G); (7840 11801388 C
A); (7841 11801950 G C); (7842 11801977 G T); (7843 11802119 G A); (7844 11802621 T A); (7845
11802677 A AAAAG); (7846 11802739 C T); (7847 11802778 C T); (7848 11802785 T C); (7849 11803082
C T); (7850 11803098 A G); (7851 11803155 A G); (7852 11803223 A G); (7853 11803226 G A); (7854
11803254 C A); (7855 11803404 G A); (7856 11803433 G A); (7857 11803528 A G); (7858 11803875 G
GA); (7859 11804033 A G); (7860 11804136 A G); (7861 11804261 G C); (7862 11804427 G C); (7863
11804556 T C); (7864 11804579 G C); (7865 11804717 T G); (7866 11804870 A C); (7867 11805270 C
T); (7868 11805392 A T); (7869 11805722 AC A); (7870 11805932 G A); (7871 11806624 A G); (7872
11807555 C T); (7873 11808370 G A); (7874 11808447 C T); (7875 11808454 C T); (7876 11808825 G
A); (7877 11809176 G T); (7878 11809329 T C); (7879 11809537 C G); (7880 11810140 C T); (7881
11810153 A G); (7882 11811005 A C); (7883 11811822 C T); (7884 11812121 T C); (7885 11812495 A
G); (7886 11812727 T A); (7887 11812991 C A); (7888 11813141 A T); (7889 11813241 T TC); (7890
11813424 T C); (7891 11813443 T A); (7892 11813462 G GT); (7893 11813467 C A); (7894 11813553 A
G); (7895 11813771 A G); (7896 11813784 T C); (7897 11813997 C T); (7898 11814626 G A); (7899
11814735 C A); (7900 11814738 T C); (7901 11814897 A T); (7902 11814922 A C); (7903 11815084 T
G); (7904 11815117 A G); (7905 11815169 G A); (7906 11815898 A G); (7907 11816074 A G); (7908
11816169 A C); (7909 11816285 GA G); (7910 11817229 C A); (7911 11817249 T C); (7912 11817335 T
C); (7913 11817366 G A); (7914 11817719 A G); (7915 11817887 G T); (7916 11819172 T G); (7917
11828624 C T); (7918 11829356 A T); (7919 11830416 C A); (7920 11830474 T C); (7921 11830477 C
T); (7922 11831336 T C); (7923 11831709 C T); (7924 11831884 T C); (7925 11832014 C T); (7926
11832149 G T); (7927 11832275 T A); (7928 11832337 T A); (7929 11832533 C T); (7930 11832573 A
T); (7931 11832936 T C); (7932 11833143 A G); (7933 11833396 A G); (7934 11833585 A G); (7935
11833686 A G); (7936 11833690 T C); (7937 11833777 G A); (7938 11833837 C T); (7939 11834148 G
A); (7940 11834190 G T); (7941 11834236 C T); (7942 11834403 A C); (7943 11835085 A G); (7944
11835102 A G); (7945 11835284 G A); (7946 11835740 A G); (7947 11835830 T C); (7948 11835905 C
T); (7949 11836029 T C); (7950 11836043 T C); (7951 11836305 G C); (7952 11836718 C A); (7953
11836764 T A); (7954 11837205 G T); (7955 11837244 A G); (7956 11837600 A G); (7957 11837736 C
A); (7958 11837747 G A); (7959 11837991 A G); (7960 11838110 A C); (7961 11838937 A G); (7962
11839340 C A); (7963 11839566 C T); (7964 11839643 T G); (7965 11839875 C T); (7966 11839995 A
C); (7967 11840013 A AAGCT); (7968 11840100 A G); (7969 11840249 A G); (7970 11840467 T C); (7971
11840530 G T); (7972 11840775 A AT); (7973 11841329 C T); (7974 11841666 A G); (7975 11841957 G
A); (7976 11842003 A G); (7977 11842136 A C); (7978 11842312 A G); (7979 11842485 T C); (7980
11842545 T C); (7981 11842898 G A); (7982 11842947 GA G); (7983 11842987 G A); (7984 11843767 A
G); (7985 11844273 C T); (7986 11844385 C A); (7987 11844415 C CTAAT); (7988 11844772 A G); (7989
11844952 T A); (7990 11845048 GA G); (7991 11845286 T C); (7992 11845334 T C); (7993 11845344 C
T); (7994 11846541 A AT); (7995 11846732 C A); (7996 11847102 G A); (7997 11847680 C T); (7998
11847749 T C); (7999 11847881 G A); (8000 11848180 T C); (8001 11848218 A G); (8002 11848242 C
A); (8003 11848259 G A); (8004 11848307 T G); (8005 11848531 T C); (8006 11848536 C T); (8007
11848913 A C); (8008 11849353 A G); (8009 11849554 A G); (8010 11850862 G T); (8011 11851195 G
C); (8012 11851294 C T); (8013 11851295 A T); (8014 11851985 A G); (8015 11852032 T C); (8016
11852154 A G); (8017 11852224 T C); (8018 11852484 T C); (8019 11852775 G A); (8020 11853115 T
C); (8021 11853144 G A); (8022 11853257 T C); (8023 11853305 G A); (8024 11853325 G A); (8025
11853361 A T); (8026 11853363 AC A); (8027 11853526 T C); (8028 11853577 C T); (8029 11853586 T
C); (8030 11853848 C T); (8031 11853982 T G); (8032 11854226 T C); (8033 11854417 G A); (8034
11854420 C T); (8035 11854486 A G); (8036 11854583 C T); (8037 11854847 G A); (8038 11855059 A
G); (8039 11855232 G A); (8040 11855245 T C); (8041 11855272 G A); (8042 11856254 A G); (8043
11856378 C T); (8044 11856450 G T); (8045 11857258 A T); (8046 11857571 T C); (8047 11859130 A
G); (8048 11859402 T G); (8049 11860089 G A); (8050 11860164 T C); (8051 11860174 G A); (8052
11860349 TGG T); (8053 11860705 A C); (8054 11860736 C G); (8055 11860769 T C); (8056 11860789 C
CGCGCTGATCGCGCCACTCTG); (8057 11860812 T G); (8058 11861070 A G); (8059 11861351 T C); (8060
11861460 G A); (8061 11861751 G A); (8062 11861845 T C); (8063 11862107 G A); (8064 11862128 C
A); (8065 11862262 A G); (8066 11862362 C A); (8067 11862407 T C); (8068 11862572 T G); (8069
11863216 G A); (8070 11863499 T A); (8071 11863811 A G); (8072 11864307 C T); (8073 11864403 G
A); (8074 11864572 C T); (8075 11864609 G T); (8076 11864691 G A); (8077 11865580 C A); (8078
11866012 C A); (8079 11866065 T G); (8080 11866135 T C); (8081 11866291 G A); (8082 11866666 T
C); (8083 11866816 G A); (8084 11866824 G A); (8085 11866852 G A); (8086 11867120 A C); (8087
11867248 T C); (8088 11867412 G A); (8089 11867502 C A); (8090 11867603 C T); (8091 11867624 AC
A); (8092 11867739 G A); (8093 11867805 A G); (8094 11867827 C T); (8095 11868197 C T); (8096
11868451 G T); (8097 11868474 C G); (8098 11868551 AATAT A); (8099 11868927 T C); (8100 11869136
C T); (8101 11869843 C T); (8102 11870135 T G); (8103 11870201 C A); (8104 11870422 G A); (8105
11870635 A G); (8106 11870925 G A); (8107 11871035 T C); (8108 11871072 G A); (8109 11871079 G
A); (8110 11871126 T A); (8111 11871127 T G); (8112 11871212 C T); (8113 11871303 A G); (8114
11871331 T C); (8115 11871432 A G); (8116 11871441 T C); (8117 11871585 T A); (8118 11871616 A
C); (8119 11871725 G A); (8120 11871742 G GC); (8121 11871975 T G); (8122 11872179 C T); (8123
11872340 C T); (8124 11872382 C T); (8125 11872903 G A); (8126 11872979 C T); (8127 11873003 C
T); (8128 11873083 G A); (8129 11873156 C T); (8130 11873334 C T); (8131 11873452 C T); (8132
11873523 T C); (8133 11873804 G A); (8134 11873965 C T); (8135 11874013 A G); (8136 11874116 C
T); (8137 11874134 A G); (8138 11874211 C G); (8139 11874397 A G); (8140 11874583 T C); (8141
11874690 T C); (8142 11874830 T C); (8143 11874854 G A); (8144 11875005 G A); (8145 11875051 T
C); (8146 11875115 C T); (8147 11875127 G A); (8148 11875559 T C); (8149 11875696 A T); (8150
11875917 G T); (8151 11875945 T C); (8152 11876256 TG T); (8153 11876391 C T); (8154 11876531 G
A); (8155 11876797 G A); (8156 11877172 G A); (8157 11877521 A G); (8158 11877744 G A); (8159
11877811 G T); (8160 11877834 G C); (8161 11877866 A AC); (8162 11877896 T G); (8163 11878753 G
A); (8164 11878886 G A); (8165 11878925 A G); (8166 11878969 C T); (8167 11879247 G A); (8168
11879359 C T); (8169 11880142 A G); (8170 11880219 T C); (8171 11880466 T C); (8172 11880483 A
G); (8173 11880508 C T); (8174 11880931 A C); (8175 11880939 A G); (8176 11881320 A G); (8177
11881327 C T); (8178 11881381 A G); (8179 11882013 C T); (8180 11882076 T A); (8181 11882374 G
A); (8182 11882419 C T); (8183 11882483 C T); (8184 11882551 T C); (8185 11882560 C T); (8186
11882796 G A); (8187 11882826 G A); (8188 11882858 G T); (8189 11883023 C G); (8190 11883169 C
T); (8191 11883255 G A); (8192 11883302 G A); (8193 11883363 T C); (8194 11883424 A G); (8195
11883463 C A); (8196 11883815 T A); (8197 11884061 T C); (8198 11884212 A T); (8199 11886054 A
G); (8200 11886414 C T); (8201 11886912 G A); (8202 11886917 A G); (8203 11887481 G A); (8204
11888802 T C); (8205 11888847 C T); (8206 11888938 G C); (8207 11888988 A G); (8208 11893700 G
A); (8209 11896362 TA T); (8210 11896471 C T); (8211 11896557 G A); (8212 11896702 C T); (8213
11897448 T C); (8214 11897485 G A); (8215 11897516 A T); (8216 11897711 A G); (8217 11897762 A
G); (8218 11897855 T C); (8219 11898042 G A); (8220 11898383 A G); (8221 11899655 G T); (8222
11899667 T C); (8223 11899785 A G); (8224 11899839 G A); (8225 11901240 G A); (8226 11901260 T
C); (8227 11901287 C T); (8228 11901310 G A); (8229 11901747 C T); (8230 11901998 T A); (8231
11903175 C T); (8232 11906552 C T); (8233 11907722 C A); (8234 11909736 T C); (8235 11909824 A
G); (8236 11909946 A G); (8237 11912222 G T); (8238 11912253 A G); (8239 11912281 A G); (8240
11912297 C T); (8241 11912634 A G); (8242 11912648 T C); (8243 11913133 A G); (8244 11913244 A
G); (8245 11913262 C G); (8246 11913309 A G); (8247 11913696 T C); (8248 11914556 T C); (8249
11914565 C T); (8250 11914633 A G); (8251 11914760 T C); (8252 11914845 T C); (8253 11915411 G
A); (8254 11915533 T TACCTAAC); (8255 11915886 G A); (8256 11915899 CTGATGGCTGGG C); (8257
11916055 G A); (8258 11916271 T C); (8259 11916987 A C); (8260 11917060 G T); (8261 11917101 T
C); (8262 11917204 G A); (8263 11917477 G A); (8264 11917538 G A); (8265 11917554 A G); (8266
11917793 C T); (8267 11917805 C A); (8268 11918485 CT C); (8269 11919438 T C); (8270 11919466 T
C); (8271 11919798 G A); (8272 11920960 T A); (8273 11921511 T C); (8274 11921907 A T); (8275
11922304 G A); (8276 11922414 C T); (8277 11923678 T A); (8278 11923717 G T); (8279 11923857 T
TCATGAA); (8280 11923860 A G); (8281 11924040 T C); (8282 11924052 G T); (8283 11924126 A
G); (8284 11924250 C A); (8285 11924723 G A); (8286 11925747 C T); (8287 11926028 T C); (8288
11926396 C T); (8289 11926493 A C); (8290 11927399 A G); (8291 11927432 C T); (8292 11927433 G
A); (8293 11927509 A G); (8294 11927625 A G); (8295 11927870 C T); (8296 11929664 C T); (8297
11930623 C T); (8298 11930739 G A); (8299 11930759 C T); (8300 11930931 C T); (8301 11931014 A
G); (8302 11931268 A C); (8303 11931493 G A); (8304 11931834 T C); (8305 11931899 G A); (8306
11932509 A C); (8307 11932625 T G); (8308 11932797 G T); (8309 11932925 A T); (8310 11933011 G
T); (8311 11933258 T A); (8312 11933386 T G); (8313 11933424 C T); (8314 11933607 G A); (8315
11933670 T TAGATCA); (8316 11934476 G A); (8317 11934658 A T); (8318 11934660 A AAGTT); (8319
11935231 G A); (8320 11935492 C A); (8321 11935979 T C); (8322 11936170 T C); (8323 11936187 C
G); (8324 11936651 G A); (8325 11936706 T G); (8326 11936804 C CAT); (8327 11937439 C T); (8328
11939964 T C); (8329 11940210 A G); (8330 11940277 A G); (8331 11940296 G A); (8332 11940399 C
T); (8333 11940458 T C); (8334 11940570 A G); (8335 11940974 A G); (8336 11941183 C A); (8337
11941356 C T); (8338 11941434 C T); (8339 11941642 T C); (8340 11941668 A G); (8341 11941732 A
G); (8342 11941735 G A); (8343 11941877 A G); (8344 11942059 T C); (8345 11942287 G A); (8346
11942543 G A); (8347 11945426 C A); (8348 11945631 G A); (8349 11946303 G A); (8350 11946367 A
G); (8351 11946495 T C); (8352 11946503 G A); (8353 11946642 C T); (8354 11946806 T C); (8355
11947091 A T); (8356 11947176 A G); (8357 11948074 T C); (8358 11948363 T A); (8359 11948381 C
T); (8360 11948789 T C); (8361 11948874 T A); (8362 11949204 T C); (8363 11949244 G A); (8364
11950154 C T); (8365 11950251 A C); (8366 11951537 G A); (8367 11952257 G A); (8368 11953463 G
C); (8369 11953584 G A); (8370 11953587 G A); (8371 11961555 ATGGTGAATG A); (8372 11962179 G
A); (8373 11962377 C T); (8374 11962528 C T); (8375 11963381 T C); (8376 11964130 G T); (8377
11964407 C T); (8378 11964599 A G); (8379 11965148 A T); (8380 11965946 T TA); (8381 11965988 A
G); (8382 11966024 G A); (8383 11966132 G A); (8384 11966226 CA C); (8385 11966322 C T); (8386
11966672 T C); (8387 11967230 A G); (8388 11967422 A G); (8389 11967488 G A); (8390 11968602 C
A); (8391 11970752 G A); (8392 11971063 G A); (8393 11971342 AT A); (8394 11971346 G A); (8395
11971669 G A); (8396 11972101 A T); (8397 11972706 G A); (8398 11973073 A G); (8399 11973167 A
G); (8400 11973241 A G); (8401 11973279 A G); (8402 11973302 C T); (8403 11973583 G A); (8404
11973658 T C); (8405 11973687 T C); (8406 11973896 G A); (8407 11973971 T G); (8408 11974000 A
G); (8409 11974092 T C); (8410 11974145 G T); (8411 11974587 G A); (8412 11974889 C T); (8413
11975208 T TAAGAGCTAAAAG); (8414 11975284 G A); (8415 11975310 C A); (8416 11975363 A
G); (8417 11975394 C T); (8418 11975550 A G); (8419 11975582 C T); (8420 11976098 T G); (8421
11976186 C T); (8422 11976449 T C); (8423 11976512 C T); (8424 11977174 G T); (8425 11977177 A
G); (8426 11977268 T G); (8427 11977376 T C); (8428 11977386 T C); (8429 11978011 T C); (8430
11978663 G A); (8431 11978804 C T); (8432 11980153 G A); (8433 11980294 T C); (8434 11980882 T
C); (8435 11981060 T G); (8436 11981133 A G); (8437 11981410 C T); (8438 11982167 G A); (8439
11982243 G A); (8440 11982285 A G); (8441 11982554 C T); (8442 11982602 T C); (8443 11984036 T
C); (8444 11985836 T C); (8445 11985892 T C); (8446 11985945 A G); (8447 11986297 C T); (8448
11986524 C T); (8449 11986915 T G); (8450 11987215 T C); (8451 11988223 A G); (8452 11988570 C
T); (8453 11989064 T C); (8454 11989082 C T); (8455 11989270 CAT C); (8456 11989566 C G); (8457
11989742 A G); (8458 11989813 G A); (8459 11990036 C T); (8460 11990332 A G); (8461 11990357 G
A); (8462 11991528 A G); (8463 11991783 A C); (8464 11991819 C T); (8465 11992059 T C); (8466
11992076 G A); (8467 11992795 A G); (8468 11992995 C T); (8469 11993157 G C); (8470 11993346 T
C); (8471 11993478 T C); (8472 11993750 T TA); (8473 11994091 G C); (8474 11994516 C G); (8475
11994551 A T); (8476 11994733 A AC); (8477 11994912 C T); (8478 11994939 A C); (8479 11995213 C
A); (8480 11995624 G C); (8481 11995808 A T); (8482 11995935 A C); (8483 11996417 A C); (8484
11997166 A G); (8485 11997242 A G); (8486 11997400 A G); (8487 11997472 G A); (8488 12001407 C
T); (8489 12002849 T C); (8490 12003154 C T); (8491 12003406 T C); (8492 12003673 T C); (8493
12003694 T C); (8494 12003731 C T); (8495 12003771 C T); (8496 12003912 C T); (8497 12003916 C
T); (8498 12004943 C T); (8499 12005630 G A); (8500 12006245 T G); (8501 12006246 T G); (8502
12006664 T G); (8503 12007044 T A); (8504 12007058 A AC); (8505 12007132 C A); (8506 12007181 G
A); (8507 12007292 A G); (8508 12007299 T C); (8509 12007396 G A); (8510 12007838 A G); (8511
12007901 A G); (8512 12008076 C T); (8513 12011032 G A); (8514 12011445 G A); (8515 12011461 G
T); (8516 12011579 C T); (8517 12011797 A G); (8518 12012163 C G); (8519 12012305 C A); (8520
12012360 CATTT C); (8521 12012800 A T); (8522 12012999 T C); (8523 12013016 A G); (8524 12013348
C A); (8525 12013372 C T); (8526 12013931 A C); (8527 12016363 G GT); (8528 12016422 A G); (8529
12016653 T C); (8530 12016675 T C); (8531 12016739 G A); (8532 12016778 T C); (8533 12017339 C
T); (8534 12017559 G A); (8535 12017766 C T); (8536 12018156 A C); (8537 12018853 A T); (8538
12018988 C T); (8539 12019008 A G); (8540 12019796 A G); (8541 12020084 T C); (8542 12020456 C
T); (8543 12021053 A G); (8544 12022866 C T); (8545 12022955 CT C); (8546 12023081 C T); (8547
12023607 A G); (8548 12024211 T G); (8549 12025399 T C); (8550 12025433 TCTAG T); (8551 12026608
T C); (8552 12026804 C A); (8553 12027468 G A); (8554 12027601 G A); (8555 12027634 T C); (8556
12028252 G A); (8557 12028540 G A); (8558 12028623 T C); (8559 12028678 G C); (8560 12028850 T
C); (8561 12029056 C T); (8562 12029164 C CAACG); (8563 12029711 A G); (8564 12029801 G A); (8565
12030440 AC A); (8566 12030804 TA T); (8567 12031388 C A); (8568 12031407
ACGTTTATATTTAAGCAAT A); (8569 12032214 T C); (8570 12032929 C T); (8571 12033379
GTATTTAAACCTA G); (8572 12033604 T A); (8573 12033605 A T); (8574 12033606 T A); (8575 12035267
A G); (8576 12035312 G A); (8577 12035339 C T); (8578 12035648 A T); (8579 12035688 G A); (8580
12035730 A G); (8581 12036234 A G); (8582 12036373 C T); (8583 12036419 T C); (8584 12036656 G
A); (8585 12036688 G A); (8586 12036765 G A); (8587 12036783 C T); (8588 12036877 A G); (8589
12037046 A C); (8590 12037124 T A); (8591 12037137 C T); (8592 12037191 T C); (8593 12037320 C
T); (8594 12037434 G T); (8595 12037486 T C); (8596 12037491 C T); (8597 12038107 T C); (8598
12038354 T C); (8599 12038362 C T); (8600 12038436 T C); (8601 12038451 G A); (8602 12038602 C
A); (8603 12038783 T C); (8604 12039048 C T); (8605 12039174 C T); (8606 12039384 C G); (8607
12039393 C T); (8608 12041953 A G); (8609 12042040 G A); (8610 12042100 T G); (8611 12042144 G
A); (8612 12042241 A G); (8613 12042331 G C); (8614 12042598 G A); (8615 12042933 C T); (8616
12043207 A C); (8617 12043226 T A); (8618 12043318 C T); (8619 12043350 G T); (8620 12044065 A
G); (8621 12044081 T C); (8622 12044166 A G); (8623 12044172 T G); (8624 12044284 A G); (8625
12044342 T C); (8626 12044407 G A); (8627 12044414 G A); (8628 12044420 G A); (8629 12044426 G
T); (8630 12044459 G A); (8631 12044570 T A); (8632 12044652 C T); (8633 12044843 T C); (8634
12044953 T C); (8635 12045072 T C); (8636 12045119 G A); (8637 12045121 T C); (8638 12045144 A
C); (8639 12045352 G A); (8640 12045371 G A); (8641 12045396 G A); (8642 12045417 T C); (8643
12045422 C T); (8644 12045547 C T); (8645 12045569 T A); (8646 12045579 T C); (8647 12045662 G
A); (8648 12045837 C T); (8649 12045977 T C); (8650 12046258 A G); (8651 12046576 G C); (8652
12046607 G A); (8653 12046631 T G); (8654 12046785 G A); (8655 12047097 G A); (8656 12047585 A
G); (8657 12047604 T C); (8658 12047859 G A); (8659 12048742 T TA); (8660 12048824 A G); (8661
12049419 TTA T); (8662 12049521 G T); (8663 12050196 G GA); (8664 12050518 AT A); (8665 12050679
A AT); (8666 12051195 TTA T); (8667 12051318 A G); (8668 12051559 C T); (8669 12053450 G T); (8670
12053789 G T); (8671 12054868 AT A); (8672 12054928 T TA); (8673 12055225 A T); (8674 12055343 C
G); (8675 12055891 C T); (8676 12056009 C T); (8677 12056036 G A); (8678 12056079 A G); (8679
12056269 A T); (8680 12056366 G T); (8681 12056925 G T); (8682 12056993 G GATA); (8683 12057035
G A); (8684 12058032 TA T); (8685 12058417 A G); (8686 12058444 T C); (8687 12059127 G A); (8688
12059158 A G); (8689 12059300 A G); (8690 12059455 G T); (8691 12059533 C T); (8692 12059570 A
G); (8693 12059601 C A); (8694 12059867 G A); (8695 12059875 G GC); (8696 12059936 G A); (8697
12060110 T C); (8698 12060112 G C); (8699 12060140 C G); (8700 12060357 T C); (8701 12060364 A
G); (8702 12060607 AC A); (8703 12060950 C A); (8704 12061489 T C); (8705 12063597 A G); (8706
12063634 C T); (8707 12064079 T C); (8708 12064086 A G); (8709 12064613 G A); (8710 12065132 TA
T); (8711 12065338 A G); (8712 12065694 G A); (8713 12065773 T C); (8714 12066781 C T); (8715
12066796 C T); (8716 12066863 C T); (8717 12066976 T A); (8718 12067038 C T); (8719 12067173 T
G); (8720 12067301 T C); (8721 12067303 C T); (8722 12067401 G C); (8723 12067501 TA T); (8724
12067615 T C); (8725 12067782 T C); (8726 12067871 C G); (8727 12067953 G A); (8728 12068040 T
G); (8729 12068231 C T); (8730 12069340 A G); (8731 12069464 G T); (8732 12069496 C T); (8733
12070525 T C); (8734 12070967 C G); (8735 12071263 T C); (8736 12071521 C T); (8737 12071552 A
G); (8738 12071589 G A); (8739 12071620 C T); (8740 12071632 A G); (8741 12071962 C T); (8742
12080278 T A); (8743 12080325 G A); (8744 12081097 T C); (8745 12081357 T A); (8746 12081581 C
T); (8747 12081615 C T); (8748 12081657 A C); (8749 12081766 C T); (8750 12081911 A G); (8751
12082099 CAAT C); (8752 12082292 G C); (8753 12082311 A G); (8754 12082902 C T); (8755 12083078 A
G); (8756 12083668 G A); (8757 12083721 AT A); (8758 12083789 A G); (8759 12084283 G A); (8760
12084420 G C); (8761 12085135 C T); (8762 12085321 A G); (8763 12086107 G A); (8764 12087132 A
G); (8765 12087217 G A); (8766 12087534 G A); (8767 12087565 T C); (8768 12088522 G A); (8769
12089202 T C); (8770 12089418 A T); (8771 12090443 G A); (8772 12090528 C T); (8773 12091343 A
G); (8774 12091361 A G); (8775 12091651 A G); (8776 12091713 T C); (8777 12092787 C A); (8778
12092997 T C); (8779 12093153 A G); (8780 12093216 A C); (8781 12094036 G A); (8782 12094064 T
C); (8783 12094784 G A); (8784 12095232 G A); (8785 12095541 G T); (8786 12095672 G C); (8787
12096397 G A); (8788 12096645 T C); (8789 12096680 G A); (8790 12097015 T G); (8791 12097584 A
C); (8792 12097672 G A); (8793 12097711 A G); (8794 12097806 C T); (8795 12097928 C A); (8796
12098114 T C); (8797 12098222 G C); (8798 12098411 T C); (8799 12099023 G A); (8800 12100044 G
A); (8801 12100114 C A); (8802 12100286 C T); (8803 12100392 A C); (8804 12100400 A G); (8805
12101080 T C); (8806 12101370 C T); (8807 12101679 G A); (8808 12101901 C T); (8809 12102074 C
A); (8810 12102374 T C); (8811 12102869 T C); (8812 12103807 A G); (8813 12103865 G A); (8814
12103880 G T); (8815 12104354 C T); (8816 12104677 A G); (8817 12105017 A T); (8818 12105954 A
G); (8819 12106088 A G); (8820 12106178 C A); (8821 12106780 C T); (8822 12106983 T A); (8823
12107175 A G); (8824 12108360 G A); (8825 12108881 T A); (8826 12109062 T C); (8827 12109067 T
C); (8828 12109465 C T); (8829 12109537 T A); (8830 12109929 G A); (8831 12110392 C A); (8832
12110439 A G); (8833 12110719 A C); (8834 12111970 T C); (8835 12112289 A G); (8836 12113179 A
G); (8837 12113206 A G); (8838 12113393 A T); (8839 12113588 C CT); (8840 12114282 A T); (8841
12116743 G A); (8842 12118526 T C); (8843 12118531 A G); (8844 12118733 C T); (8845 12119499 A
G); (8846 12119800 G A); (8847 12119868 C T); (8848 12119967 T G); (8849 12119987 T C); (8850
12120012 A G); (8851 12120409 A G); (8852 12120785 A G); (8853 12120878 G C); (8854 12120906 A
G); (8855 12120923 G A); (8856 12121158 A G); (8857 12121218 G A); (8858 12121735 A G); (8859
12121741 T C); (8860 12122410 T C); (8861 12123030 T C); (8862 12123071 A G); (8863 12123102 C
T); (8864 12126291 C T); (8865 12126306 A G); (8866 12126346 A G); (8867 12126416 G C); (8868
12126422 A G); (8869 12126758 G A); (8870 12127190 A C); (8871 12127234 A C); (8872 12127284 C
T); (8873 12127979 A T); (8874 12128027 G A); (8875 12128341 G A); (8876 12128353 G C); (8877
12128387 C A); (8878 12128474 C T); (8879 12128761 T C); (8880 12129090 T A); (8881 12129175 A
G); (8882 12129416 C T); (8883 12129425 A G); (8884 12129495 A AT); (8885 12129556 T A); (8886
12129934 CCG C); (8887 12129988 A C); (8888 12130496 A G); (8889 12130687 CT C); (8890 12131744 C
CAT); (8891 12132535 C CTTTAA); (8892 12133447 A G); (8893 12133471 T C); (8894 12133550 A
T); (8895 12133875 A G); (8896 12134158 C A); (8897 12134247 A AAT); (8898 12134307 A AC); (8899
12134846 C CT); (8900 12135505 A T); (8901 12135744 G T); (8902 12135948 G A); (8903 12136109 G
A); (8904 12136168 C G); (8905 12136859 A G); (8906 12137143 C T); (8907 12137300 G A); (8908
12137506 T C); (8909 12137517 G C); (8910 12137531 C T); (8911 12137611 G A); (8912 12137878 T
C); (8913 12138518 T C); (8914 12138671 C A); (8915 12139319 GA G); (8916 12139456 C T); (8917
12139599 C T); (8918 12139735 G A); (8919 12139850 A G); (8920 12140749 T G); (8921 12141075 CTTA
C); (8922 12142159 A G); (8923 12142570 T C); (8924 12142585 A T); (8925 12142618 C A); (8926
12142632 T C); (8927 12143169 C T); (8928 12143600 A G); (8929 12143616 T A); (8930 12144009 G
A); (8931 12144042 T C); (8932 12144669 C A); (8933 12144882 GA G); (8934 12145116 A AT); (8935
12145362 G A); (8936 12145794 G A); (8937 12146383 AAG A); (8938 12146601 T G); (8939 12146893 A
G); (8940 12146916 T A); (8941 12146959 G GA); (8942 12147059 CT C); (8943 12147082 T A); (8944
12147221 A G); (8945 12147352 A T); (8946 12147443 T C); (8947 12147621 A G); (8948 12147894 A
G); (8949 12148458 C T); (8950 12148887 C T); (8951 12148919 CA C); (8952 12149121 T C); (8953
12149189 G A); (8954 12149254 T G); (8955 12149330 C T); (8956 12149468 T C); (8957 12150314 A
C); (8958 12150744 A G); (8959 12150807 T G); (8960 12150846 A G); (8961 12150959 G A); (8962
12151528 G A); (8963 12151599 G A); (8964 12151612 G T); (8965 12152147 G T); (8966 12152341 A
G); (8967 12152440 G A); (8968 12152494 G T); (8969 12152530 T C); (8970 12153655 T C); (8971
12153678 G A); (8972 12153732 A G); (8973 12153862 ATACT A); (8974 12154163 A C); (8975 12154512
G A); (8976 12155104 A G); (8977 12155130 C T); (8978 12155597 A G); (8979 12156114 G T); (8980
12156223 T G); (8981 12156861 T C); (8982 12156912 G A); (8983 12157433 T C); (8984 12157640 AT
A); (8985 12157835 G A); (8986 12158060 T C); (8987 12158082 T C); (8988 12158093 C T); (8989
12158140 A G); (8990 12158154 T G); (8991 12158192 A G); (8992 12158198 C T); (8993 12158202 A
G); (8994 12158215 C T); (8995 12158595 T C); (8996 12159739 TA T); (8997 12159804 A
AATATAT); (8998 12161864 A AT); (8999 12162913 GA G); (9000 12162988 A T); (9001 12163589 A
G); (9002 12163843 GA G); (9003 12163887 T C); (9004 12163943 G A); (9005 12163966 C T); (9006
12163970 C T); (9007 12164355 A AATATAT); (9008 12164458 T A); (9009 12164461 A G); (9010
12164462 G T); (9011 12164463 T A); (9012 12164574 TA T); (9013 12164894 C A); (9014 12165774 T
C); (9015 12166007 T C); (9016 12166114 G A); (9017 12166119 G A); (9018 12166133 AC A); (9019
12166379 A G); (9020 12166728 A T); (9021 12166915 A G); (9022 12167229 G A); (9023 12167294 T
C); (9024 12167383 G A); (9025 12167528 G A); (9026 12167762 C A); (9027 12168698 G A); (9028
12168774 A G); (9029 12169191 T A); (9030 12169490 A G); (9031 12169681 A G); (9032 12169724 C
A); (9033 12169733 T G); (9034 12169754 T C); (9035 12170309 T C); (9036 12170435 T C); (9037
12170744 C T); (9038 12170999 C T); (9039 12171347 C T); (9040 12171351 T G); (9041 12171728 G
A); (9042 12171819 C T); (9043 12172872 G A); (9044 12172957 C T); (9045 12173055 T C); (9046
12173660 G A); (9047 12174319 C T); (9048 12174391 A T); (9049 12175361 C T); (9050 12175805 C
T); (9051 12176237 C G); (9052 12176499 G A); (9053 12176674 A G); (9054 12177037 T C); (9055
12177187 A G); (9056 12177230 T C); (9057 12177293 T C); (9058 12178862 G A); (9059 12180387 C
T); (9060 12183128 T C); (9061 12186783 A G); (9062 12186938 C T); (9063 12186953 C T); (9064
12187024 G A); (9065 12187177 C T); (9066 12187381 T C); (9067 12187394 T C); (9068 12189015 T
A); (9069 12189099 G T); (9070 12189124 T C); (9071 12189286 C A); (9072 12189315 A G); (9073
12189454 C T); (9074 12190042 A G); (9075 12190599 G A); (9076 12190690 A G); (9077 12190735 G
A); (9078 12190910 C T); (9079 12191261 ATTT A); (9080 12191333 A T); (9081 12191521 C T); (9082
12191638 T C); (9083 12192599 A C); (9084 12193271 A C); (9085 12193605 G A); (9086 12193649 C
T); (9087 12195611 T C); (9088 12195708 C T); (9089 12195889 T C); (9090 12196016 C T); (9091
12196415 A G); (9092 12196950 C T); (9093 12197619 T C); (9094 12197776 A G); (9095 12197989 C
T); (9096 12198240 GA G); (9097 12198574 T C); (9098 12198800 T C); (9099 12199084 T C); (9100
12199236 G A); (9101 12199240 T C); (9102 12199316 T G); (9103 12199372 G A); (9104 12200008 G
C); (9105 12200146 A G); (9106 12200307 CTTT C); (9107 12200355 C T); (9108 12200566 A G); (9109
12201512 G A); (9110 12201636 C T); (9111 12201703 C T); (9112 12201734 A G); (9113 12201767 T
C); (9114 12202183 G A); (9115 12202797 G A); (9116 12203541 G A); (9117 12203672 T C); (9118
12203752 G T); (9119 12203849 C T); (9120 12204127 C T); (9121 12205022 T C); (9122 12205031 G
A); (9123 12205495 A G); (9124 12206063 C T); (9125 12206276 A T); (9126 12207053 T TA); (9127
12208241 T A); (9128 12209001 C A); (9129 12209309 A G); (9130 12209669 G GT); (9131 12211274 A
G); (9132 12211303 T C); (9133 12212190 C T); (9134 12213070 C T); (9135 12213557 G A); (9136
12213927 A C); (9137 12214296 G A); (9138 12216228 A G); (9139 12216377 A T); (9140 12217259 T
A); (9141 12218138 G A); (9142 12218167 C T); (9143 12218181 G A); (9144 12218195 A G); (9145
12218205 C G); (9146 12218363 G A); (9147 12218462 G A); (9148 12219170 C T); (9149 12219195 C
T); (9150 12219262 A ATC); (9151 12219291 T G); (9152 12219347 AACTT A); (9153 12219712 T C); (9154
12220074 A G); (9155 12220306 G A); (9156 12220921 G A); (9157 12221143 T G); (9158 12221171 G
A); (9159 12221923 T C); (9160 12221952 G T); (9161 12222602 G T); (9162 12222846 A G); (9163
12223749 G A); (9164 12223811 T C); (9165 12223831 C T); (9166 12224695 G T); (9167 12224995 G
T); (9168 12226848 C T); (9169 12226905 A G); (9170 12226996 C T); (9171 12227145 A G); (9172
12227254 C T); (9173 12227405 T G); (9174 12227504 T G); (9175 12227808 T TA); (9176 12227827 C
T); (9177 12227831 A C); (9178 12227863 A G); (9179 12227912 T C); (9180 12227915 A G); (9181
12227989 A G); (9182 12228629 C G); (9183 12229870 G A); (9184 12230194 C A); (9185 12230694 G
A); (9186 12230934 C T); (9187 12231444 A C); (9188 12232584 A G); (9189 12232709 G A); (9190
12232737 T C); (9191 12232832 C T); (9192 12233789 G A); (9193 12234081 T C); (9194 12234109 A
C); (9195 12234177 T C); (9196 12234199 C A); (9197 12234269 G A); (9198 12236218 T G); (9199
12236239 A G); (9200 12236428 G A); (9201 12237086 A C); (9202 12237764 C A); (9203 12237829 A
G); (9204 12238276 T A); (9205 12238606 G T); (9206 12238658 AT A); (9207 12239248 G A); (9208
12240197 A G); (9209 12241008 G A); (9210 12241282 C T); (9211 12241302 C T); (9212 12242737 G
A); (9213 12243007 C T); (9214 12243022 A G); (9215 12243326 G A); (9216 12243400 G GA); (9217
12243453 T C); (9218 12243464 A G); (9219 12243505 C T); (9220 12245096 G A); (9221 12245987 ATT
A); (9222 12246860 C T); (9223 12247707 A T); (9224 12247732 GGTT G); (9225 12248688 G A); (9226
12249426 A G); (9227 12251399 C T); (9228 12251411 G T); (9229 12252112 A G); (9230 12252677 T
G); (9231 12252818 A T); (9232 12253222 A AT); (9233 12253371 T C); (9234 12253579 C A); (9235
12253611 A C); (9236 12253895 T C); (9237 12254071 T C); (9238 12254146 TG T); (9239 12254150 G
T); (9240 12255015 A C); (9241 12255161 A T); (9242 12255661 T C); (9243 12255755 C CA); (9244
12255862 A G); (9245 12255901 G A); (9246 12255960 A T); (9247 12256452 AT A); (9248 12256567 T
A); (9249 12256886 G A); (9250 12257053 C A); (9251 12257289 G A); (9252 12257295 G A); (9253
12257370 G A); (9254 12257397 G A); (9255 12257415 G A); (9256 12257506 T C); (9257 12258121 G
C); (9258 12258350 A G); (9259 12258351 T C); (9260 12258432 G A); (9261 12258508 C T); (9262
12258582 C T); (9263 12258628 A G); (9264 12258743 A ATT); (9265 12258887 T TA); (9266 12259248 T
C); (9267 12259304 A G); (9268 12259464 C T); (9269 12259476 C T); (9270 12259477 G A); (9271
12259520 A C); (9272 12261446 C T); (9273 12261717 C T); (9274 12261782 G T); (9275 12262232 T
C); (9276 12262619 G A); (9277 12262744 A T); (9278 12262839 C T); (9279 12263008 C T); (9280
12263078 A T); (9281 12263216 T G); (9282 12263424 G A); (9283 12264121 C A); (9284 12264261 T
A); (9285 12264300 G A); (9286 12264858 T G); (9287 12264962 T C); (9288 12265048 C T); (9289
12265800 A G); (9290 12265905 C A); (9291 12266051 C A); (9292 12266055 G A); (9293 12266270 C
T); (9294 12266287 TA T); (9295 12266828 C T); (9296 12267435 C T); (9297 12267694 T C); (9298
12267793 G A); (9299 12267833 T C); (9300 12267910 A G); (9301 12267961 C T); (9302 12267985 G
C); (9303 12268121 G A); (9304 12269313 C T); (9305 12269445 C G); (9306 12269506 C T); (9307
12269638 G A); (9308 12270006 T C); (9309 12270045 C T); (9310 12270080 T C); (9311 12270714 C
T); (9312 12273390 A G); (9313 12273624 G A); (9314 12276687 A G); (9315 12277432 C A); (9316
12277507 C T); (9317 12277569 T C); (9318 12277593 G A); (9319 12277862 T C); (9320 12278139 G
T); (9321 12278185 T C); (9322 12278233 A G); (9323 12278254 T G); (9324 12278290 A G); (9325
12278364 T C); (9326 12278407 C T); (9327 12278490 G A); (9328 12278497 A G); (9329 12278520 C
A); (9330 12278847 C T); (9331 12279103 C CCATAAGTTAT); (9332 12279114 G A); (9333 12279163 C
T); (9334 12279308 G A); (9335 12279343 C T); (9336 12279380 G T); (9337 12279471 G A); (9338
12279508 A G); (9339 12279744 C T); (9340 12279806 T C); (9341 12279979 G C); (9342 12280920 T
G); (9343 12281893 C T); (9344 12281972 T C); (9345 12282008 T C); (9346 12282343 A T); (9347
12283258 G A); (9348 12284592 A C); (9349 12284646 A G); (9350 12285983 T C); (9351 12286102 A
G); (9352 12286240 A G); (9353 12286466 T C); (9354 12286473 G A); (9355 12286486 G A); (9356
12286506 C T); (9357 12286711 C G); (9358 12287506 G A); (9359 12290029 C G); (9360 12290432 C
T); (9361 12290464 G T); (9362 12290494 A T); (9363 12290507 G A); (9364 12290531 G A); (9365
12290698 C T); (9366 12291063 C A); (9367 12291940 A T); (9368 12292010 C T); (9369 12292051 G
A); (9370 12292177 T C); (9371 12292242 A C); (9372 12292255 T C); (9373 12292292 T C); (9374
12292349 T G); (9375 12292600 C T); (9376 12292833 C T); (9377 12292877 G C); (9378 12293174 GCA
G); (9379 12293219 A G); (9380 12293537 T C); (9381 12293603 A G); (9382 12294280 A G); (9383
12294862 C G); (9384 12295353 C T); (9385 12295462 C T); (9386 12295490 T A); (9387 12295680 A
G); (9388 12295827 C A); (9389 12296211 T C); (9390 12296376 A G); (9391 12296708 A C); (9392
12297294 T A); (9393 12297597 A C); (9394 12297642 T C); (9395 12297729 T G); (9396 12297816 C
T); (9397 12298177 G A); (9398 12298558 A G); (9399 12298629 G T); (9400 12298635 G A); (9401
12299011 A G); (9402 12299496 T TTA); (9403 12299605 A T); (9404 12299677 G A); (9405 12300940 T
C); (9406 12301211 G T); (9407 12301300 A C); (9408 12301964 A AAT); (9409 12302055 A G); (9410
12302874 T A); (9411 12303142 C CA); (9412 12303194 G GA); (9413 12303465 G A); (9414 12303575 A
G); (9415 12303970 T G); (9416 12304436 G T); (9417 12304496 CA C); (9418 12305232 G A); (9419
12305265 G A); (9420 12305605 AT A); (9421 12305748 C A); (9422 12306084 C T); (9423 12306641 T
A); (9424 12306916 CTA C); (9425 12307034 C T); (9426 12307649 G A); (9427 12307908 A G); (9428
12308139 G A); (9429 12308266 A G); (9430 12308435 C T); (9431 12308546 A G); (9432 12308571 T
C); (9433 12308591 G A); (9434 12308678 G A); (9435 12308689 G A); (9436 12309234 T C); (9437
12309255 C T); (9438 12309369 A C); (9439 12309411 T C); (9440 12309755 C T); (9441 12309870 G
A); (9442 12309988 A G); (9443 12310024 C T); (9444 12310809 G A); (9445 12310904 G T); (9446
12311012 T G); (9447 12311291 GA G); (9448 12311555 T C); (9449 12311811 T TG); (9450 12312292 T
C); (9451 12312472 G T); (9452 12313468 GA G); (9453 12314890 A G); (9454 12314922 C T); (9455
12315170 A G); (9456 12315655 T C); (9457 12316127 C A); (9458 12316654 A C); (9459 12316926 T
A); (9460 12317046 A G); (9461 12317128 G A); (9462 12317411 T G); (9463 12317580 A ATAAT); (9464
12317814 G A); (9465 12317942 A G); (9466 12318645 A C); (9467 12318657 G A); (9468 12318687 T
A); (9469 12318777 T G); (9470 12319037 C G); (9471 12319417 T C); (9472 12319519 T A); (9473
12319759 G A); (9474 12319879 G A); (9475 12320634 C T); (9476 12320858 A G); (9477 12321083 A
G); (9478 12321352 G A); (9479 12321816 C A); (9480 12322474 A C); (9481 12322609 G
GACACTTTACTTA); (9482 12322922 T C); (9483 12323025 A G); (9484 12323263 G A); (9485 12323351 T
C); (9486 12323701 G A); (9487 12323932 G T); (9488 12324182 G A); (9489 12324375 G A); (9490
12324393 T C); (9491 12324539 T C); (9492 12325034 T G); (9493 12326057 C T); (9494 12327397 A
G); (9495 12327854 A G); (9496 12328591 T G); (9497 12328655 C G); (9498 12328797 G A); (9499
12328800 G A); (9500 12329183 C T); (9501 12329239 C T); (9502 12329266 A G); (9503 12329328 C
T); (9504 12329382 G A); (9505 12329498 C T); (9506 12329861 G A); (9507 12330427 G GGCAA); (9508
12331355 A G); (9509 12332184 C T); (9510 12332726 G A); (9511 12333089 G C); (9512 12333357 G
A); (9513 12334909 G C); (9514 12334910 C A); (9515 12335773 A G); (9516 12335958 C T); (9517
12336160 G A); (9518 12336555 T C); (9519 12337276 T C); (9520 12337376 G A); (9521 12337699 G
A); (9522 12337744 G T); (9523 12337748 G T); (9524 12337957 T C); (9525 12338006 T G); (9526
12338128 C T); (9527 12339818 A G); (9528 12345542 A C); (9529 12347296 T C); (9530 12348369 T
G); (9531 12348603 A G); (9532 12350092 T C); (9533 12350919 A G); (9534 12350933 G A); (9535
12351044 A G); (9536 12351047 A G); (9537 12351126 A G); (9538 12352027 G A); (9539 12353411 T
C); (9540 12354258 A G); (9541 12354298 C T); (9542 12354365 C T); (9543 12354400 G A); (9544
12354478 A G); (9545 12354560 C T); (9546 12354834 C T); (9547 12354849 T C); (9548 12354941 C
G); (9549 12355850 T C); (9550 12356205 C T); (9551 12356334 G A); (9552 12357230 C T); (9553
12357238 C T); (9554 12357254 A G); (9555 12357554 A G); (9556 12357595 C A); (9557 12357630 G
A); (9558 12357901 G A); (9559 12358013 T C); (9560 12358032 A G); (9561 12358938 A C); (9562
12358945 C T); (9563 12359013 GAT G); (9564 12360702 C T); (9565 12362262 C T); (9566 12362452 GA
G); (9567 12362470 AT A); (9568 12362525 T C); (9569 12362989 C A); (9570 12363456 C T); (9571
12363828 T C); (9572 12363989 G A); (9573 12366662 G A); (9574 12367263 A G); (9575 12367491 T
C); (9576 12367914 C T); (9577 12367919 A C); (9578 12368089 T C); (9579 12368265 C A); (9580
12368919 C T); (9581 12368927 G A); (9582 12369026 C T); (9583 12369080 G C); (9584 12369141 G
A); (9585 12369163 G T); (9586 12369232 G A); (9587 12369233 G A); (9588 12369505 T C); (9589
12369541 T C); (9590 12369754 A G); (9591 12369760 T C); (9592 12370895 C T); (9593 12370906 C
T); (9594 12371180 T G); (9595 12371189 T C); (9596 12371538 C T); (9597 12371722 C T); (9598
12371985 C T); (9599 12372310 GA G); (9600 12372596 G A); (9601 12372742 G T); (9602 12373236 A
G); (9603 12373605 G T); (9604 12373744 G A); (9605 12373753 G T); (9606 12373774 G A); (9607
12373873 G A); (9608 12373903 A C); (9609 12374060 C T); (9610 12374268 C T); (9611 12374528 T
A); (9612 12375388 A G); (9613 12375501 A G); (9614 12375858 C T); (9615 12375958 T C); (9616
12376683 C T); (9617 12377128 T C); (9618 12377228 G GA); (9619 12378279 A G); (9620 12378874 A
G); (9621 12379241 A G); (9622 12379358 C G); (9623 12379380 T C); (9624 12380906 G T); (9625
12381031 G A); (9626 12381157 C G); (9627 12381203 A G); (9628 12381205 T G); (9629 12381372 C
T); (9630 12381454 C T); (9631 12381701 A G); (9632 12381900 G T); (9633 12382101 C T); (9634
12382204 C T); (9635 12382263 C T); (9636 12382417 G A); (9637 12382456 C T); (9638 12382573 G
A); (9639 12382610 T A); (9640 12382776 G A); (9641 12382778 A G); (9642 12382846 A G); (9643
12383194 G A); (9644 12383195 G A); (9645 12383196 G A); (9646 12383211 A G); (9647 12383371 G
C); (9648 12383477 G A); (9649 12383489 T C); (9650 12383504 A G); (9651 12383685 T A); (9652
12383869 A G); (9653 12384061 G A); (9654 12384183 C T); (9655 12384234 A C); (9656 12384245 C
T); (9657 12384434 G A); (9658 12384594 A T); (9659 12385085 A C); (9660 12385123 C T); (9661
12385255 G A); (9662 12385257 T C); (9663 12385338 G A); (9664 12385340 T C); (9665 12385482 A
C); (9666 12386153 A C); (9667 12386206 G T); (9668 12386322 C A); (9669 12386593 C A); (9670
12386719 A G); (9671 12386851 T G); (9672 12387148 A G); (9673 12387167 C T); (9674 12387297 G
A); (9675 12387649 A C); (9676 12387655 A G); (9677 12388001 G A); (9678 12388050 G A); (9679
12388063 G A); (9680 12388130 A G); (9681 12388537 G A); (9682 12388691 T G); (9683 12388764 AT
A); (9684 12388791 A G); (9685 12389518 T C); (9686 12389613 T C); (9687 12389765 G T); (9688
12389776 G A); (9689 12389777 T C); (9690 12389798 G A); (9691 12389972 A C); (9692 12389979 T
A); (9693 12390139 G A); (9694 12390631 G T); (9695 12390811 A G); (9696 12390938 G T); (9697
12391392 C T); (9698 12391612 C T); (9699 12391650 T C); (9700 12391986 A G); (9701 12392006 A
G); (9702 12392196 C T); (9703 12392213 A G); (9704 12393258 A G); (9705 12393361 C G); (9706
12393698 C T); (9707 12393705 T C); (9708 12393752 T G); (9709 12393755 A C); (9710 12393761 T
G); (9711 12394002 G A); (9712 12394234 G A); (9713 12394251 G T); (9714 12394305 G C); (9715
12394667 T C); (9716 12395175 A G); (9717 12395763 T C); (9718 12396621 G A); (9719 12396655 A
G); (9720 12396734 C T); (9721 12397061 T A); (9722 12397315 C G); (9723 12398236 T C); (9724
12399663 G T); (9725 12399838 T C); (9726 12400374 G A); (9727 12400574 T C); (9728 12400789 A
G); (9729 12401295 T C); (9730 12402193 T A); (9731 12402194 C T); (9732 12402332 G A); (9733
12402363 C A); (9734 12402369 G C); (9735 12402431 A G); (9736 12402507 G A); (9737 12402513 A
G); (9738 12402533 T C); (9739 12402957 A G); (9740 12402970 T C); (9741 12403001 C T); (9742
12403018 G A); (9743 12403040 C T); (9744 12403069 T C); (9745 12403070 T G); (9746 12403071 A
C); (9747 12403109 C T); (9748 12403172 C A); (9749 12403379 G A); (9750 12403496 G T); (9751
12403673 G A); (9752 12403682 A G); (9753 12404698 T C); (9754 12404811 T C); (9755 12404907 C
T); (9756 12404910 C T); (9757 12405099 T A); (9758 12405151 G A); (9759 12405170 A G); (9760
12405172 C T); (9761 12405573 G A); (9762 12406435 A C); (9763 12406445 G A); (9764 12406763 T
A); (9765 12406911 T A); (9766 12407068 A G); (9767 12407186 G A); (9768 12407419 G A); (9769
12407492 T C); (9770 12407498 T C); (9771 12407533 A G); (9772 12407576 AT A); (9773 12407595 G
A); (9774 12407743 T C); (9775 12409138 A G); (9776 12409510 A C); (9777 12410061 G A); (9778
12410233 C T); (9779 12410296 G A); (9780 12411181 T C); (9781 12411389 A C); (9782 12411431 C
T); (9783 12412091 A C); (9784 12412300 G A); (9785 12412617 A AC); (9786 12412686 C T); (9787
12412725 G A); (9788 12413408 T G); (9789 12413426 C CT); (9790 12413797 C T); (9791 12413975 T
C); (9792 12414248 G A); (9793 12415243 T C); (9794 12415346 C T); (9795 12415480 T C); (9796
12416299 T C); (9797 12416321 AC A); (9798 12416595 T A); (9799 12417238 A AG); (9800 12417326 G
A); (9801 12418453 G A); (9802 12418985 T G); (9803 12419179 A G); (9804 12419303 T G); (9805
12419397 C T); (9806 12419406 A G); (9807 12419430 A G); (9808 12419442 T C); (9809 12422065 T
G); (9810 12422123 A G); (9811 12422407 G A); (9812 12422622 A G); (9813 12423040 T G); (9814
12423571 G A); (9815 12423655 G A); (9816 12423816 C T); (9817 12424098 A G); (9818 12425517 G
A); (9819 12426300 A G); (9820 12426429 A G); (9821 12426474 G A); (9822 12426494 A G); (9823
12428516 T C); (9824 12428534 T C); (9825 12428553 A G); (9826 12428581 G A); (9827 12428620 G
A); (9828 12428643 A C); (9829 12429161 G A); (9830 12429207 T C); (9831 12430053 G T); (9832
12430400 A G); (9833 12430956 G T); (9834 12431112 C T); (9835 12431235 A G); (9836 12431923 C
T); (9837 12432586 A T); (9838 12432655 C T); (9839 12432790 T C); (9840 12433448 C T); (9841
12433490 T C); (9842 12433759 G A); (9843 12434002 G C); (9844 12434034 T C); (9845 12434753 G
C); (9846 12434793 A G); (9847 12434903 A G); (9848 12434924 A G); (9849 12435640 C T); (9850
12435669 T C); (9851 12435818 A C); (9852 12435930 C A); (9853 12436285 T C); (9854 12436327 T
C); (9855 12436468 T C); (9856 12436493 A G); (9857 12436541 A G); (9858 12436608 A C); (9859
12436609 A C); (9860 12437327 T C); (9861 12437415 A T); (9862 12437772 A G); (9863 12438092 T
C); (9864 12438230 C A); (9865 12438452 A G); (9866 12439305 A G); (9867 12439360 C T); (9868
12439568 A T); (9869 12439684 A G); (9870 12439686 C A); (9871 12439689 A T); (9872 12439709 G
A); (9873 12439734 A G); (9874 12439797 A G); (9875 12440271 T C); (9876 12440575 T C); (9877
12440645 G C); (9878 12442375 ATCGAT A); (9879 12442437 C T); (9880 12442597 G A); (9881
12443008 C A); (9882 12443118 T A); (9883 12443172 A G); (9884 12443406 G A); (9885 12444185 G
T); (9886 12444377 A C); (9887 12444455 T G); (9888 12444736 A AACACTATG); (9889 12445026 T
G); (9890 12445491 T C); (9891 12447219 T C); (9892 12447590 A T); (9893 12448253 C T); (9894
12448439 A T); (9895 12448673 A T); (9896 12448689 G A); (9897 12448840 C T); (9898 12449423 T
C); (9899 12449948 G A); (9900 12450497 C G); (9901 12451333 T A); (9902 12451336 A G); (9903
12451343 A G); (9904 12451355 T G); (9905 12451625 A T); (9906 12451660 A G); (9907 12453478 C
T); (9908 12453505 G A); (9909 12453506 T C); (9910 12453706 A G); (9911 12455100 C T); (9912
12456187 A G); (9913 12456234 A G); (9914 12456289 G A); (9915 12457227 T A); (9916 12457273 A
G); (9917 12457346 A G); (9918 12457372 G A); (9919 12459758 C T); (9920 12460416 C A); (9921
12460914 C T); (9922 12461780 AC A); (9923 12461964 G A); (9924 12462000 G A); (9925 12464403 C
T); (9926 12464599 CT C); (9927 12465583 A G); (9928 12466232 C A); (9929 12466655 T G); (9930
12466656 A G); (9931 12466722 G T); (9932 12467121 A G); (9933 12467259 T G); (9934 12467281 C
G); (9935 12467700 A G); (9936 12467803 C T); (9937 12467833 G A); (9938 12468277 C T); (9939
12468358 T C); (9940 12468598 AC A); (9941 12468632 G A); (9942 12468766 A C); (9943 12468987 A
T); (9944 12469396 A G); (9945 12469994 T G); (9946 12470507 A G); (9947 12471193 G A); (9948
12471438 T C); (9949 12471458 TTGA T); (9950 12471485 C A); (9951 12471853 C T); (9952 12471937 T
C); (9953 12472024 T C); (9954 12472267 G A); (9955 12472415 T C); (9956 12472503 A G); (9957
12472595 T C); (9958 12472741 C T); (9959 12473457 A AT); (9960 12473877 T A); (9961 12473879 G
A); (9962 12473903 T A); (9963 12473979 A G); (9964 12474668 T G); (9965 12474707 T C); (9966
12474829 C G); (9967 12475060 A G); (9968 12476409 C G); (9969 12476622 C T); (9970 12476657 T
G); (9971 12476855 A G); (9972 12476953 G A); (9973 12477716 A C); (9974 12477909 T G); (9975
12478449 G A); (9976 12479362 C T); (9977 12479429 A G); (9978 12479730 T A); (9979 12480038 C
T); (9980 12480104 A AAC); (9981 12480309 T G); (9982 12480525 C T); (9983 12480607 G T); (9984
12481033 T C); (9985 12481131 T C); (9986 12481223 T G); (9987 12481386 A G); (9988 12481931 T
G); (9989 12482066 C T); (9990 12482189 A C); (9991 12482365 G A); (9992 12482366 C T); (9993
12482370 G A); (9994 12482450 G A); (9995 12482855 G A); (9996 12482909 T A); (9997 12482941 G
A); (9998 12483094 T C); (9999 12483157 G T); (10000 12483196 G A); (10001 12483388 A G); (10002
12483604 A G); (10003 12483645 T G); (10004 12483792 C T); (10005 12484211 G C); (10006 12484373
A G); (10007 12484533 G A); (10008 12484626 C T); (10009 12484716 A G); (10010 12484783 C
T); (10011 12485233 G A); (10012 12485874 T C); (10013 12486141 T C); (10014 12486266 A G); (10015
12486396 T C); (10016 12486457 T C); (10017 12486638 CA C); (10018 12486701 C T); (10019 12486791
C T); (10020 12486974 A AT); (10021 12487039 G A); (10022 12487109 G A); (10023 12487126 C
T); (10024 12487166 C T); (10025 12487299 C T); (10026 12487343 T C); (10027 12487579 G A); (10028
12487656 T C); (10029 12487709 G A); (10030 12487819 AAT A); (10031 12488343 G A); (10032
12489015 C T); (10033 12489174 G T); (10034 12489294 A G); (10035 12489516 C T); (10036 12489517
A G); (10037 12489529 C G); (10038 12489550 G A); (10039 12489649 A G); (10040 12489701 T
C); (10041 12489721 C T); (10042 12489761 A G); (10043 12489762 C T); (10044 12489960 T C); (10045
12490013 G A); (10046 12490099 C G); (10047 12490149 G A); (10048 12490235 CAGG C); (10049
12490465 T A); (10050 12490626 A G); (10051 12490765 T C); (10052 12490841 G A); (10053 12491406
T G); (10054 12491945 C T); (10055 12492202 G A); (10056 12492363 A G); (10057 12492781 A
C); (10058 12493525 T G); (10059 12493910 G A); (10060 12494134 G T); (10061 12494172 G A); (10062
12494288 G T); (10063 12494462 G GA); (10064 12495632 T C); (10065 12495844 T A); (10066
12496334 T A); (10067 12496366 A T); (10068 12496427 C A); (10069 12496438 A G); (10070 12496485
C T); (10071 12496529 G C); (10072 12496636 T C); (10073 12497559 C G); (10074 12497799 T C); (10075
12499937 GA G); (10076 12501088 C T); (10077 12501177 C T); (10078 12502170 T C); (10079 12502505
G A); (10080 12502534 A C); (10081 12502588 G A); (10082 12502927 C T); (10083 12503033 T
G); (10084 12503909 T G); (10085 12504064 C T); (10086 12504722 G A); (10087 12504984 C T); (10088
12505236 C T); (10089 12505429 G A); (10090 12505505 C T); (10091 12505943 T G); (10092 12506139
G A); (10093 12506988 A G); (10094 12507422 C T); (10095 12507533 A G); (10096 12507538 C
T); (10097 12507614 T A); (10098 12507906 G A); (10099 12508184 A G); (10100 12508302 C T); (10101
12508413 A G); (10102 12508524 C G); (10103 12508733 AAGC A); (10104 12508772 T G); (10105
12509686 A G); (10106 12510609 G T); (10107 12510705 T G); (10108 12511072 C T); (10109 12511171
A T); (10110 12511345 G A); (10111 12511382 A G); (10112 12511417 G A); (10113 12511442 T
C); (10114 12511462 T C); (10115 12511550 A G); (10116 12511576 T C); (10117 12512786 T C); (10118
12512885 C T); (10119 12513203 A G); (10120 12513291 T C); (10121 12513480 A G); (10122 12513796
T A); (10123 12514035 T A); (10124 12514071 T C); (10125 12514162 A G); (10126 12514166 C T); (10127
12514609 G A); (10128 12514645 T C); (10129 12515008 T C); (10130 12515151 G A); (10131 12515278
A G); (10132 12515499 A AG); (10133 12516057 G A); (10134 12517109 T C); (10135 12517309 G
A); (10136 12517327 T A); (10137 12517882 G T); (10138 12518091 G A); (10139 12518301 T C); (10140
12518324 A T); (10141 12518667 C T); (10142 12519041 T C); (10143 12519418 C T); (10144 12519891 C
A); (10145 12519924 A G); (10146 12520283 GA G); (10147 12520473 A G); (10148 12520580 C
A); (10149 12520766 C T); (10150 12520827 C A); (10151 12520907 A C); (10152 12521106 C T); (10153
12521326 T G); (10154 12521803 A G); (10155 12521884 A G); (10156 12521990 T C); (10157 12522500
C T); (10158 12522788 C CT); (10159 12522906 C T); (10160 12522980 T C); (10161 12523589 T
C); (10162 12523624 G A); (10163 12524031 A T); (10164 12524809 C T); (10165 12524889 C T); (10166
12525320 A G); (10167 12525450 A G); (10168 12525591 T C); (10169 12525613 G A); (10170 12525669
A C); (10171 12525759 C T); (10172 12525813 G A); (10173 12526145 CCATATTGAAA C); (10174
12526434 A G); (10175 12526624 T C); (10176 12526641 A G); (10177 12526654 T C); (10178 12526735
A G); (10179 12527272 C T); (10180 12527522 G A); (10181 12527557 G A); (10182 12527666 A
G); (10183 12527708 G A); (10184 12527918 G A); (10185 12528052 T A); (10186 12528198 G A); (10187
12529121 C T); (10188 12530668 A C); (10189 12530744 G C); (10190 12530783 G C); (10191 12531094
T C); (10192 12531155 GT G); (10193 12531184 G A); (10194 12532447 T C); (10195 12532518 T
G); (10196 12532908 G T); (10197 12532974 G A); (10198 12533054 T C); (10199 12533065 GA
G); (10200 12533073 C T); (10201 12533112 A AT); (10202 12535088 C A); (10203 12536050 A G); (10204
12536213 A G); (10205 12538014 GT G); (10206 12538735 A G); (10207 12538870 TA T); (10208
12538888 AT A); (10209 12539001 C T); (10210 12539136 A C); (10211 12539537 C A); (10212 12539579
A G); (10213 12539845 A G); (10214 12539883 A G); (10215 12539991 G A); (10216 12540052 A
G); (10217 12540077 A G); (10218 12541186 C T); (10219 12541231 A T); (10220 12541333 C T); (10221
12541874 C T); (10222 12541908 G A); (10223 12541968 A G); (10224 12541978 G A); (10225 12542038
T G); (10226 12542143 T G); (10227 12542330 G T); (10228 12544316 G A); (10229 12545777 A
G); (10230 12545874 C A); (10231 12548722 T A); (10232 12548740 T C); (10233 12549725 T C); (10234
12551985 G A); (10235 12552149 A G); (10236 12552316 A G); (10237 12552394 G A); (10238 12552408
G T); (10239 12552672 T C); (10240 12552983 T C); (10241 12552984 T C); (10242 12552991 T C); (10243
12553312 C T); (10244 12553383 T C); (10245 12553459 A G); (10246 12553791 T G); (10247 12553869
AT A); (10248 12554394 T C); (10249 12554513 C T); (10250 12554535 C G); (10251 12554783 A
T); (10252 12555008 T A); (10253 12555241 C A); (10254 12556151 C T); (10255 12556181 G A); (10256
12556215 T A); (10257 12556226 T C); (10258 12556284 T C); (10259 12556909 C T); (10260 12556976 C
G); (10261 12557203 T C); (10262 12557325 T C); (10263 12557378 T C); (10264 12558891 G T); (10265
12558893 G T); (10266 12558975 C A); (10267 12559295 C T); (10268 12560190 T C); (10269 12560271 C
G); (10270 12560309 T A); (10271 12560383 C A); (10272 12560388 T C); (10273 12560760 C A); (10274
12561046 G A); (10275 12561571 G A); (10276 12561842 A C); (10277 12561844 A C); (10278 12561846
A C); (10279 12561848 A C); (10280 12561920 A G); (10281 12562043 T C); (10282 12562158 A
G); (10283 12562359 T C); (10284 12562929 C A); (10285 12563176 T C); (10286 12565667 A G); (10287
12567345 A G); (10288 12567470 A C); (10289 12567608 A G); (10290 12567790 A G); (10291 12567814
G A); (10292 12568040 C T); (10293 12568246 T C); (10294 12568791 G A); (10295 12568800 G
A); (10296 12568841 G T); (10297 12568918 C T); (10298 12569449 G A); (10299 12569453 A G); (10300
12570129 T C); (10301 12570247 A G); (10302 12571090 C T); (10303 12571343 G C); (10304 12571638
C T); (10305 12572055 G C); (10306 12572576 A C); (10307 12573076 A G); (10308 12573759 A
C); (10309 12574217 A G); (10310 12574829 T G); (10311 12574980 G C); (10312 12575138 C T); (10313
12575196 A G); (10314 12575668 G GAAGGTCGAAAATGAATTA); (10315 12575888 G C); (10316
12576740 C T); (10317 12577169 G A); (10318 12577970 C A); (10319 12578728 G A); (10320 12579001
A G); (10321 12579126 C G); (10322 12579608 G C); (10323 12580174 A G); (10324 12580404 C
A); (10325 12580420 A T); (10326 12580700 T G); (10327 12581408 A G); (10328 12581499 T A); (10329
12581834 G T); (10330 12581929 T C); (10331 12582074 A G); (10332 12582287 T G); (10333 12583013
AT A); (10334 12583102 A ATGTGTTTC); (10335 12583236 T A); (10336 12583278 C T); (10337 12583352
T C); (10338 12583999 T C); (10339 12584235 A G); (10340 12584364 A G); (10341 12584501 TG
T); (10342 12584574 A G); (10343 12584957 T C); (10344 12585912 C T); (10345 12585951 C T); (10346
12586856 T C); (10347 12586968 G A); (10348 12587911 C T); (10349 12588066 T C); (10350 12588680
G A); (10351 12588681 A G); (10352 12589266 A G); (10353 12589619 A C); (10354 12589675 A
G); (10355 12589830 C T); (10356 12590327 T A); (10357 12591338 C T); (10358 12591587 G T); (10359
12591795 G A); (10360 12591947 T G); (10361 12592065 T C); (10362 12592212 A G); (10363 12592783
T A); (10364 12592797 A T); (10365 12593850 C G); (10366 12594112 A G); (10367 12594319 A
T); (10368 12594386 G C); (10369 12594785 C T); (10370 12594923 G A); (10371 12594937 T C); (10372
12594968 A G); (10373 12595208 T C); (10374 12595254 T G); (10375 12595257 AAG A); (10376
12595804 A G); (10377 12596075 T C); (10378 12596115 G A); (10379 12596321 C T); (10380 12596541
T C); (10381 12597096 T C); (10382 12597529 C T); (10383 12597545 C T); (10384 12598193 C A); (10385
12598217 G A); (10386 12598442 G A); (10387 12598503 A G); (10388 12598626 A G); (10389 12598639
A C); (10390 12598726 T C); (10391 12598848 G A); (10392 12599383 G A); (10393 12600004 G
A); (10394 12601089 T G); (10395 12601146 G A); (10396 12601336 T C); (10397 12601469 T C); (10398
12601794 T A); (10399 12602010 T A); (10400 12602188 C A); (10401 12602806 G GA); (10402
12602874 C A); (10403 12603548 A C); (10404 12603617 G A); (10405 12603697 A AT); (10406
12603711 G T); (10407 12603928 A G); (10408 12603988 T G); (10409 12604465 C G); (10410 12604881
A AT); (10411 12605616 T C); (10412 12606352 G A); (10413 12606596 C A); (10414 12606870 A
T); (10415 12606928 G A); (10416 12607051 T C); (10417 12607146 C A); (10418 12607301 A T); (10419
12607344 G A); (10420 12607571 A C); (10421 12607642 A G); (10422 12608747 TC T); (10423
12608756 A C); (10424 12608841 C T); (10425 12609015 T A); (10426 12609102 T A); (10427 12609626
G A); (10428 12610006 T C); (10429 12610067 T C); (10430 12610095 A C); (10431 12610112 AT
A); (10432 12610274 A G); (10433 12611135 G A); (10434 12611291 G A); (10435 12611558 C T); (10436
12611626 G A); (10437 12611783 A G); (10438 12611800 T A); (10439 12612165 A G); (10440 12612427
A G); (10441 12612791 T C); (10442 12613212 T C); (10443 12613509 A G); (10444 12613831 A
T); (10445 12615097 T C); (10446 12615108 T C); (10447 12615116 G T); (10448 12615659 T A); (10449
12615685 C T); (10450 12616376 G A); (10451 12617423 C T); (10452 12617841 C T); (10453 12617843 T
C); (10454 12617995 C T); (10455 12618238 T C); (10456 12618288 T TC); (10457 12618453 C T); (10458
12618524 C T); (10459 12619028 T C); (10460 12619045 A G); (10461 12619216 T C); (10462 12619284 C
T); (10463 12619429 A G); (10464 12619431 C T); (10465 12619567 G A); (10466 12619734 C A); (10467
12619877 G A); (10468 12619989 G A); (10469 12620232 T G); (10470 12621767 A T); (10471 12621787
T C); (10472 12621790 T C); (10473 12622039 A G); (10474 12622152 G A); (10475 12622172 T
TTATTTTC); (10476 12622905 A G); (10477 12622917 C T); (10478 12622943 T C); (10479 12622961 A
G); (10480 12623319 T C); (10481 12624627 G T); (10482 12625220 G A); (10483 12626036 A T); (10484
12626173 T A); (10485 12626801 T C); (10486 12627188 C T); (10487 12627240 G A); (10488 12627245
A G); (10489 12627355 C T); (10490 12627682 A G); (10491 12627776 A G); (10492 12627953 G
T); (10493 12628533 T C); (10494 12628556 C T); (10495 12628557 A G); (10496 12629041 T A); (10497
12629797 C T); (10498 12629951 C T); (10499 12629998 G A); (10500 12630772 G T); (10501 12631115
G A); (10502 12631478 C T); (10503 12631796 C T); (10504 12632027 A C); (10505 12632041 G
A); (10506 12632434 C T); (10507 12632510 A G); (10508 12632667 C T); (10509 12633395 A G); (10510
12633768 A C); (10511 12633931 G A); (10512 12634448 C A); (10513 12634844 A G); (10514 12634858
T C); (10515 12634892 T C); (10516 12635043 TG T); (10517 12635064 A T); (10518 12635182 T
C); (10519 12635231 G T); (10520 12635583 T C); (10521 12635648 T C); (10522 12635776 AAG
A); (10523 12635803 A G); (10524 12637103 G C); (10525 12637256 C T); (10526 12637396 CT C); (10527
12637551 C A); (10528 12638656 T C); (10529 12639029 A G); (10530 12639210 C T); (10531 12639298
G T); (10532 12639599 C A); (10533 12639679 C T); (10534 12639781 C T); (10535 12640041 T C); (10536
12640417 A G); (10537 12640495 A G); (10538 12640708 G A); (10539 12640719 T C); (10540 12641447
T C); (10541 12641665 G A); (10542 12641811 C T); (10543 12642874 T C); (10544 12643497 G T); (10545
12643737 T C); (10546 12643745 T C); (10547 12644077 T C); (10548 12644408 C T); (10549 12644697 G
A); (10550 12644759 T C); (10551 12646655 A G); (10552 12646758 T C); (10553 12647680 G A); (10554
12647844 T C); (10555 12647862 T C); (10556 12648711 A G); (10557 12648712 A G); (10558 12648714
A G); (10559 12648720 A G); (10560 12648786 A G); (10561 12650707 C A); (10562 12653051 G
A); (10563 12653056 G A); (10564 12655805 G A); (10565 12655916 C A); (10566 12656801 G T); (10567
12656859 T TTA); (10568 12659257 C T); (10569 12661188 A C); (10570 12661324 T C); (10571
12666964 G T); (10572 12667603 T C); (10573 12667998 C T); (10574 12668023 C T); (10575 12668775
G A); (10576 12668798 A G); (10577 12669948 C A); (10578 12670591 C A); (10579 12670790 G
A); (10580 12671424 T C); (10581 12671639 T C); (10582 12671832 C T); (10583 12671978 C
CAT); (10584 12671993 T C); (10585 12672504 T C); (10586 12672628 A C); (10587 12672759 T
C); (10588 12672766 C G); (10589 12672932 AAG A); (10590 12673007 A G); (10591 12673010 T
C); (10592 12673041 C T); (10593 12673090 T C); (10594 12673182 A G); (10595 12673191 G A); (10596
12673274 C T); (10597 12673519 C T); (10598 12673642 C T); (10599 12673845 G A); (10600 12673999 T
C); (10601 12674029 G A); (10602 12674048 A T); (10603 12674315 GTTCAC G); (10604 12674396 A
G); (10605 12674523 G A); (10606 12674525 T C); (10607 12674641 T TGA); (10608 12674668 A
G); (10609 12674743 C T); (10610 12674891 T A); (10611 12674935 A G); (10612 12675184 C T); (10613
12675198 A G); (10614 12675431 G C); (10615 12675444 A G); (10616 12675824 C G); (10617 12675834
G T); (10618 12676060 G A); (10619 12676612 T C); (10620 12676617 C A); (10621 12676832 A
G); (10622 12677162 G A); (10623 12677164 T C); (10624 12677242 A G); (10625 12677248 A G); (10626
12677413 A G); (10627 12678423 C T); (10628 12678437 C G); (10629 12678475 C T); (10630 12680065
T G); (10631 12680088 C T); (10632 12680099 A G); (10633 12680452 T G); (10634 12680514 A
G); (10635 12680537 T G); (10636 12680558 G T); (10637 12680561 G A); (10638 12680572 C T); (10639
12680707 A G); (10640 12681224 G A); (10641 12681507 T C); (10642 12682083 C T); (10643 12682107
G A); (10644 12682113 T C); (10645 12682468 T C); (10646 12683091 A G); (10647 12683264 C
T); (10648 12683293 G A); (10649 12683878 C A); (10650 12684274 C T); (10651 12684275 T C); (10652
12684298 G A); (10653 12684360 C T); (10654 12684740 G A); (10655 12684854 A G); (10656 12684924
C G); (10657 12685033 T C); (10658 12685783 A G); (10659 12686103 C G); (10660 12686203 A
T); (10661 12686461 G A); (10662 12687064 G A); (10663 12687428 C T); (10664 12687662 G A); (10665
12687785 A G); (10666 12687947 C T); (10667 12687990 T C); (10668 12688111 C T); (10669 12688361 T
C); (10670 12688370 G GA); (10671 12688373 C T); (10672 12688464 T C); (10673 12688473 C T); (10674
12688519 T C); (10675 12688595 T C); (10676 12688696 G A); (10677 12688711 C G); (10678 12688793
T C); (10679 12689178 A G); (10680 12689190 A G); (10681 12689581 T C); (10682 12689594 G
A); (10683 12689698 T C); (10684 12689737 G A); (10685 12689750 C T); (10686 12690057 C T); (10687
12690072 C T); (10688 12690146 G A); (10689 12690172 C T); (10690 12690514 A G); (10691 12691970
G A); (10692 12692188 G A); (10693 12692789 A C); (10694 12692806 C T); (10695 12692815 T
G); (10696 12692816 T C); (10697 12692826 A G); (10698 12692836 A C); (10699 12692847 T G); (10700
12692975 C T); (10701 12695766 T C); (10702 12695805 C T); (10703 12695831 T A); (10704 12696125 T
C); (10705 12696132 C T); (10706 12701989 T C); (10707 12706341 G A); (10708 12711594 C T); (10709
12711676 AAC A); (10710 12711845 A C); (10711 12711934 A C); (10712 12712111 G A); (10713
12712522 A G); (10714 12712688 G A); (10715 12714311 C T); (10716 12714413 C G); (10717 12714485
T C); (10718 12714518 T G); (10719 12715476 T C); (10720 12715583 C G); (10721 12715601 A
AG); (10722 12715779 A C); (10723 12716136 A G); (10724 12716319 T A); (10725 12716367 G
A); (10726 12718191 G A); (10727 12718515 TAA T); (10728 12718851 G A); (10729 12720279 T
C); (10730 12720682 A T); (10731 12720930 T A); (10732 12721135 G A); (10733 12721211 G T); (10734
12721609 C T); (10735 12721681 A G); (10736 12722485 A T); (10737 12722608 A G); (10738 12723483
T C); (10739 12723546 C A); (10740 12723964 G A); (10741 12723983 C T); (10742 12724985 T
G); (10743 12725276 C T); (10744 12725594 C T); (10745 12725655 G A); (10746 12725709 T C); (10747
12725717 A G); (10748 12725818 T G); (10749 12725841 G A); (10750 12725888 C T); (10751 12725897
C T); (10752 12725899 A G); (10753 12726569 G A); (10754 12726649 T C); (10755 12727040 A
G); (10756 12727582 T C); (10757 12727929 G A); (10758 12728330 G T); (10759 12729973 C T); (10760
12730265 A G); (10761 12731918 T C); (10762 12731940 T C); (10763 12732038 A G); (10764 12732064
C T); (10765 12732403 C T); (10766 12732430 T C); (10767 12732451 T C); (10768 12732484 A C); (10769
12733154 A C); (10770 12733852 T C); (10771 12734102 G A); (10772 12734153 G A); (10773 12734509
T A); (10774 12734836 G A); (10775 12735059 A G); (10776 12735439 T C); (10777 12735444 G
A); (10778 12735587 A G); (10779 12735593 C T); (10780 12735874 C T); (10781 12736248 G A); (10782
12736293 A G); (10783 12736388 G A); (10784 12736515 G A); (10785 12736536 A G); (10786 12736793
C T); (10787 12736987 A C); (10788 12737398 A C); (10789 12737548 T C); (10790 12737752 A
G); (10791 12738381 G A); (10792 12738494 T C); (10793 12738689 G A); (10794 12738705 C A); (10795
12738860 C A); (10796 12739609 T C); (10797 12739812 C A); (10798 12739973 G C); (10799 12740372
A G); (10800 12742326 C T); (10801 12742411 G A); (10802 12742488 G A); (10803 12742573 G
A); (10804 12742622 C T); (10805 12746258 C T); (10806 12746374 C T); (10807 12746405 C T); (10808
12746596 G A); (10809 12750041 A G); (10810 12752654 C T); (10811 12752739 A G); (10812 12752922
T C); (10813 12752945 T A); (10814 12770364 G A); (10815 12772610 A G); (10816 12772937 A
T); (10817 12773022 C T); (10818 12773159 A G); (10819 12773391 A G); (10820 12773452 C T); (10821
12773464 A C); (10822 12773515 T A); (10823 12773569 G C); (10824 12773612 C G); (10825 12773646
C T); (10826 12773665 C T); (10827 12774992 T C); (10828 12775039 A G); (10829 12775118 A C); (10830
12775194 C CT); (10831 12776457 C A); (10832 12776606 G A); (10833 12776682 C T); (10834 12776696
A T); (10835 12776945 G A); (10836 12776987 A G); (10837 12777060 A G); (10838 12777068 G
A); (10839 12777256 C T); (10840 12778233 A ATGCT); (10841 12778369 G A); (10842 12778394 G
A); (10843 12778462 C T); (10844 12778489 G T); (10845 12778732 C G); (10846 12778937 A C); (10847
12779130 G C); (10848 12779131 A G); (10849 12779157 C G); (10850 12779635 C T); (10851 12779751
A G); (10852 12779867 A C); (10853 12780197 A T); (10854 12780216 T G); (10855 12780244 T
C); (10856 12781083 G A); (10857 12781107 C T); (10858 12781115 G A); (10859 12781135 G A); (10860
12781195 G A); (10861 12781226 A G); (10862 12781323 A G); (10863 12781462 C T); (10864 12781590
C T); (10865 12781693 T A); (10866 12781818 T G); (10867 12782348 T G); (10868 12782488 G
C); (10869 12782514 T C); (10870 12782780 A G); (10871 12782803 T C); (10872 12783945 C T); (10873
12783984 T C); (10874 12784016 C T); (10875 12784213 C T); (10876 12784459 T C); (10877 12784571 C
T); (10878 12784772 G A); (10879 12785051 T C); (10880 12785109 A G); (10881 12785810 C T); (10882
12786530 T C); (10883 12786557 A G); (10884 12786802 G C); (10885 12786804 G C); (10886 12786864
C G); (10887 12786971 C A); (10888 12787192 G C); (10889 12788767 G A); (10890 12789058 G
A); (10891 12789977 T A); (10892 12790875 T C); (10893 12790886 C T); (10894 12790923 G A); (10895
12791059 T G); (10896 12791082 T A); (10897 12791525 G C); (10898 12792098 A C); (10899 12792529
T TA); (10900 12793039 T G); (10901 12793624 G A); (10902 12793846 G A); (10903 12793987 A
G); (10904 12794140 G A); (10905 12795033 T C); (10906 12795098 C A); (10907 12795107 C T); (10908
12796921 T A); (10909 12797050 G A); (10910 12797180 CA C); (10911 12797237 A G); (10912
12797340 T C); (10913 12797351 C A); (10914 12797651 A G); (10915 12797912 T G); (10916 12798017
A G); (10917 12798556 A G); (10918 12798557 C T); (10919 12799043 A G); (10920 12799258 T
C); (10921 12799280 G T); (10922 12799414 T C); (10923 12800174 A G); (10924 12800546 T C); (10925
12801291 T C); (10926 12801361 C T); (10927 12801375 C T); (10928 12801376 G A); (10929 12801435 C
T); (10930 12801441 T C); (10931 12801448 T C); (10932 12801537 G A); (10933 12801674 C T); (10934
12801702 G A); (10935 12801703 T C); (10936 12801734 T C); (10937 12802007 A T); (10938 12802030
A C); (10939 12802184 T C); (10940 12802429 G A); (10941 12802847 G T); (10942 12803020 G
A); (10943 12803366 C T); (10944 12803691 C T); (10945 12804111 G A); (10946 12804615 G T); (10947
12804798 T C); (10948 12805032 G A); (10949 12805126 G A); (10950 12806244 G GA); (10951
12807072 G A); (10952 12807947 A G); (10953 12807979 G A); (10954 12808833 G A); (10955 12810903
C G); (10956 12811016 T C); (10957 12811053 A G); (10958 12812026 T C); (10959 12812052 G
A); (10960 12812104 GA G); (10961 12813214 T C); (10962 12813424 T C); (10963 12813446 T C); (10964
12814643 G A); (10965 12816163 G A); (10966 12818516 C A); (10967 12819540 T G); (10968 12819596
G A); (10969 12819685 C T); (10970 12820609 C T); (10971 12820743 C A); (10972 12822964 C T); (10973
12823061 G A); (10974 12823432 A C); (10975 12823500 C T); (10976 12823726 G A); (10977 12823904
G T); (10978 12824061 G T); (10979 12824080 G C); (10980 12824614 C T); (10981 12824955 C
G); (10982 12825006 C T); (10983 12825271 A G); (10984 12825288 T C); (10985 12825316 G A); (10986
12825505 A G); (10987 12825584 G A); (10988 12826208 G A); (10989 12826218 A C); (10990 12826271
T C); (10991 12826282 T C); (10992 12826512 T G); (10993 12826532 T A); (10994 12828881 G A); (10995
12828981 A G); (10996 12828995 A G); (10997 12829093 TG T); (10998 12829311 G A); (10999
12829378 T G); (11000 12829426 T C); (11001 12830087 G T); (11002 12830110 G T); (11003 12830142
C T); (11004 12830143 C A); (11005 12830488 G T); (11006 12830497 G A); (11007 12830502 A
G); (11008 12830516 A G); (11009 12830797 A G); (11010 12830854 T C); (11011 12830968 T C); (11012
12831088 G A); (11013 12831586 T G); (11014 12831784 T A); (11015 12832925 C T); (11016 12833057
G A); (11017 12833310 T A); (11018 12833343 A G); (11019 12833510 G A); (11020 12833551 C
T); (11021 12833565 C G); (11022 12834025 A C); (11023 12834095 G A); (11024 12834099 T A); (11025
12834101 G A); (11026 12835311 C G); (11027 12835446 T C); (11028 12835454 T C); (11029 12835475
C T); (11030 12835514 C T); (11031 12835640 C T); (11032 12835871 T C); (11033 12835877 G T); (11034
12835900 A G); (11035 12837879 G A); (11036 12837887 T C); (11037 12837982 A G); (11038 12837998
C T); (11039 12838007 T C); (11040 12838015 C A); (11041 12838032 A G); (11042 12838212 C T); (11043
12838268 A C); (11044 12838441 A T); (11045 12838458 G A); (11046 12838481 T C); (11047 12838602
A G); (11048 12838652 T A); (11049 12838691 T C); (11050 12838714 A T); (11051 12838816 C T); (11052
12839200 C A); (11053 12839209 G A); (11054 12839381 C T); (11055 12839384 T C); (11056 12839417
G A); (11057 12840415 T A); (11058 12840513 A G); (11059 12840704 A G); (11060 12840914 G
A); (11061 12840995 A G); (11062 12841014 A G); (11063 12841119 G A); (11064 12841264 C G); (11065
12841451 A C); (11066 12841937 A G); (11067 12842014 T C); (11068 12842121 A G); (11069 12842142
A G); (11070 12842472 T C); (11071 12842595 G T); (11072 12842842 C T); (11073 12842857 G
A); (11074 12842972 G A); (11075 12843291 G C); (11076 12843318 T C); (11077 12843710 T A); (11078
12843904 A C); (11079 12843914 C T); (11080 12844290 G T); (11081 12844856 G T); (11082 12844907
G A); (11083 12845172 C T); (11084 12845842 G A); (11085 12846015 T C); (11086 12846128 A
C); (11087 12846206 G T); (11088 12846247 C T); (11089 12846265 T G); (11090 12846704 C T); (11091
12846802 C T); (11092 12846875 G A); (11093 12846898 C T); (11094 12847087 A G); (11095 12847359
A ACTCCTTGT); (11096 12848552 C G); (11097 12849416 C T); (11098 12852553 T C); (11099 12852752
G A); (11100 12853077 A C); (11101 12853135 C T); (11102 12853279 A G); (11103 12853932 G
A); (11104 12853935 C A); (11105 12854101 T C); (11106 12854322 A G); (11107 12854563 G A); (11108
12854652 A G); (11109 12854729 C A); (11110 12855261 C A); (11111 12855266 C T); (11112 12855280
C T); (11113 12855369 A C); (11114 12855931 G A); (11115 12855982 C T); (11116 12856218 T C); (11117
12856609 T A); (11118 12856626 G A); (11119 12856826 C G); (11120 12856846 A G); (11121 12856862
T C); (11122 12857075 G A); (11123 12857650 T C); (11124 12857684 T C); (11125 12857964 C T); (11126
12858183 A AG); (11127 12858384 C T); (11128 12858386 C T); (11129 12858563 T C); (11130 12858610
A G); (11131 12858816 A G); (11132 12859105 T G); (11133 12859474 A C); (11134 12859607 C
A); (11135 12859824 A G); (11136 12860941 G A); (11137 12860999 A G); (11138 12861123 T G); (11139
12861416 A T); (11140 12861667 T G); (11141 12861821 A G); (11142 12861878 G C); (11143 12862579
T C); (11144 12862967 T C); (11145 12862989 G A); (11146 12866190 C T); (11147 12866835 C A); (11148
12866848 G A); (11149 12867202 G A); (11150 12867248 A G); (11151 12867332 G A); (11152 12867784
A G); (11153 12867924 T C); (11154 12868592 C T); (11155 12868610 A C); (11156 12868673 T C); (11157
12869000 C T); (11158 12869209 C A); (11159 12869433 T C); (11160 12869743 C G); (11161 12869807 T
C); (11162 12869886 G A); (11163 12870133 T G); (11164 12870402 A G); (11165 12870409 C T); (11166
12870738 G A); (11167 12870804 A C); (11168 12870960 A C); (11169 12871502 C T); (11170 12872062
G A); (11171 12872227 T G); (11172 12872490 G A); (11173 12872614 G A); (11174 12872707 G
A); (11175 12873458 C T); (11176 12873507 A G); (11177 12873790 A G); (11178 12873860 T C); (11179
12874055 G A); (11180 12874136 A G); (11181 12874362 G A); (11182 12875465 C G); (11183 12875686
G T); (11184 12875744 T A); (11185 12875836 A G); (11186 12876159 A T); (11187 12876319 C
A); (11188 12876667 T C); (11189 12878004 A C); (11190 12878637 A G); (11191 12879094 A G); (11192
12881990 A AC); (11193 12881998 G A); (11194 12882942 C G); (11195 12883592 A C); (11196
12883596 A G); (11197 12883663 T C); (11198 12884403 C T); (11199 12884446 A G); (11200 12884691
A G); (11201 12885040 A C); (11202 12885299 G A); (11203 12885374 C T); (11204 12885602 G
A); (11205 12885969 T C); (11206 12886040 T A); (11207 12886067 T C); (11208 12886825 C G); (11209
12886864 G T); (11210 12887030 C T); (11211 12887291 C T); (11212 12887351 T C); (11213 12887414
G T); (11214 12887425 T G); (11215 12887491 T G); (11216 12887526 G A); (11217 12887697 A
C); (11218 12887756 C A); (11219 12888402 T C); (11220 12888964 C T); (11221 12889594 G A); (11222
12889633 C T); (11223 12889763 C T); (11224 12889771 C T); (11225 12889854 C T); (11226 12890137 C
T); (11227 12891011 C T); (11228 12891029 A C); (11229 12891114 T C); (11230 12891328 T A); (11231
12891420 A G); (11232 12892008 C T); (11233 12892032 C T); (11234 12892042 T C); (11235 12892172
G A); (11236 12892471 T C); (11237 12892491 T C); (11238 12892552 T C); (11239 12892555 T C); (11240
12892675 G A); (11241 12892774 G A); (11242 12892800 T C); (11243 12892917 G A); (11244 12892955
C T); (11245 12892985 G A); (11246 12893084 C T); (11247 12893218 C G); (11248 12893264 A
C); (11249 12893374 T C); (11250 12894142 A G); (11251 12894447 G A); (11252 12894484 A G); (11253
12895138 T G); (11254 12895603 A G); (11255 12895613 T G); (11256 12895919 G A); (11257 12896248
C T); (11258 12896957 A G); (11259 12896959 A G); (11260 12897455 G C); (11261 12897526 G
A); (11262 12898294 C T); (11263 12898510 T C); (11264 12898570 G A); (11265 12898631 A G); (11266
12898984 C T); (11267 12899118 A T); (11268 12899140 C A); (11269 12899228 C T); (11270 12899275 T
A); (11271 12899765 G A); (11272 12899777 A G); (11273 12899884 A G); (11274 12899918 C T); (11275
12900011 G A); (11276 12900013 T C); (11277 12900079 T G); (11278 12900134 A G); (11279 12900311
A G); (11280 12900391 A G); (11281 12900506 T G); (11282 12901368 T C); (11283 12901384 T
C); (11284 12902103 A G); (11285 12902283 C A); (11286 12902284 T C); (11287 12902345 G T); (11288
12902375 C T); (11289 12902419 A G); (11290 12902551 C A); (11291 12902785 G A); (11292 12903247
C T); (11293 12903559 G A); (11294 12904082 G A); (11295 12904206 C T); (11296 12904267 A
G); (11297 12904326 G A); (11298 12904641 G A); (11299 12904700 T TC); (11300 12904890 G
A); (11301 12904894 G A); (11302 12904965 G A); (11303 12905231 G A); (11304 12905410 T C); (11305
12905458 G A); (11306 12905535 G A); (11307 12905606 C T); (11308 12905769 G T); (11309 12906033
G A); (11310 12906043 C T); (11311 12906110 A G); (11312 12906420 T C); (11313 12906571 G
A); (11314 12906751 C T); (11315 12906767 G A); (11316 12906973 G C); (11317 12907176 G A); (11318
12908320 A G); (11319 12908542 A G); (11320 12908652 A T); (11321 12908706 G A); (11322 12908728
C T); (11323 12908999 C T); (11324 12909516 A G); (11325 12909602 T C); (11326 12909682 T C); (11327
12910039 G A); (11328 12910090 T C); (11329 12910127 T C); (11330 12910137 C T); (11331 12910698
G A); (11332 12910808 C T); (11333 12910824 C A); (11334 12911213 T A); (11335 12911408 G
A); (11336 12911954 C T); (11337 12912875 G C); (11338 12912896 G A); (11339 12913064 T A); (11340
12913161 A G); (11341 12914969 T C); (11342 12915008 T C); (11343 12915266 C T); (11344 12915643
A G); (11345 12915645 C T); (11346 12915801 C A); (11347 12915850 A G); (11348 12916593 C
T); (11349 12917943 G A); (11350 12918088 A C); (11351 12918586 T C); (11352 12921356 C CT); (11353
12922601 A G); (11354 12923364 C T); (11355 12924301 A G); (11356 12924315 T C); (11357 12924526
A G); (11358 12924814 G A); (11359 12925240 T C); (11360 12925605 T C); (11361 12926054 G
A); (11362 12926154 AT A); (11363 12926335 T G); (11364 12926694 T A); (11365 12926873 A T); (11366
12927132 T C); (11367 12927177 A G); (11368 12927395 C T); (11369 12929024 A G); (11370 12929552
A G); (11371 12931567 A G); (11372 12932001 T C); (11373 12932117 C T); (11374 12932171 C
T); (11375 12932232 G A); (11376 12932393 A G); (11377 12932778 C A); (11378 12932793 A G); (11379
12932995 T C); (11380 12933015 G A); (11381 12933443 G A); (11382 12933468 C T); (11383 12933573
C A); (11384 12933917 C T); (11385 12934043 T C); (11386 12934210 A G); (11387 12934471 AC
A); (11388 12934561 T C); (11389 12934575 T C); (11390 12935237 C T); (11391 12936202 C G); (11392
12936285 G C); (11393 12936928 A G); (11394 12937471 T TTTTTCTCTATTTTTCTGGG); (11395
12937491 T C); (11396 12937498 T C); (11397 12937510 G A); (11398 12937523 G A); (11399 12937563
T G); (11400 12937634 G A); (11401 12937892 T TGTAGAAGTAGGA); (11402 12937966 C T); (11403
12937988 G A); (11404 12938006 G C); (11405 12938099 G A); (11406 12938771 A G); (11407 12938779
A G); (11408 12939064 G A); (11409 12939158 G A); (11410 12939178 G A); (11411 12939242 G
A); (11412 12940882 T C); (11413 12940915 A T); (11414 12943004 G A); (11415 12943031 T G); (11416
12943594 T C); (11417 12943927 G C); (11418 12944219 A G); (11419 12944353 A G); (11420 12944538
T C); (11421 12944734 T C); (11422 12945284 G A); (11423 12945315 G T); (11424 12945493 C
A); (11425 12947318 C T); (11426 12947352 A T); (11427 12947597 T TATTAGCTTGTAATGA); (11428
12948177 C T); (11429 12948280 C T); (11430 12948302 T C); (11431 12948427 T C); (11432 12948824 C
T); (11433 12949163 C A); (11434 12949265 A T); (11435 12951885 A T); (11436 12951888 G A); (11437
12953359 A T); (11438 12953493 T C); (11439 12953497 A G); (11440 12953620 G A); (11441 12953812
CT C); (11442 12953974 A G); (11443 12954090 C T); (11444 12954207 A C); (11445 12954255 T
A); (11446 12954382 G A); (11447 12955087 T C); (11448 12955460 G A); (11449 12955498 G A); (11450
12955696 C A); (11451 12956042 A AT); (11452 12956060 T G); (11453 12956479 A G); (11454
12956486 G T); (11455 12956800 G A); (11456 12957115 C T); (11457 12957793 C T); (11458 12957931
T C); (11459 12958460 C T); (11460 12958957 A G); (11461 12958965 C T); (11462 12959534 T A); (11463
12959664 T A); (11464 12959679 A G); (11465 12959691 T C); (11466 12959717 T C); (11467 12959724
A G); (11468 12959736 G A); (11469 12959788 T A); (11470 12959822 A G); (11471 12959844 T
C); (11472 12963512 G A); (11473 12963774 C G); (11474 12963894 A G); (11475 12964549 G A); (11476
12965058 G T); (11477 12965139 T C); (11478 12965239 G A); (11479 12965454 C A); (11480 12965501
T A); (11481 12965514 A T); (11482 12965820 T C); (11483 12965938 G A); (11484 12966029 C
A); (11485 12966032 A C); (11486 12966284 G T); (11487 12966663 G A); (11488 12966771 C T); (11489
12967646 G T); (11490 12968696 G A); (11491 12968732 T A); (11492 12968736 T A); (11493 12982696
T A); (11494 12982698 A T); (11495 12982766 CT C); (11496 12983791 C CCAA); (11497 12985627 C
A); (11498 12985761 G A); (11499 12986000 G A); (11500 12986918 T A); (11501 12986919 T A); (11502
12987071 A C); (11503 12987109 AG A); (11504 12987208 G GA); (11505 12987350 A G); (11506
12987974 A C); (11507 12987981 T C); (11508 12990417 C T); (11509 12990443 C T); (11510 12990791 T
C); (11511 12990974 T C); (11512 12991015 C A); (11513 12991112 A G); (11514 12991186 A C); (11515
12991203 A C); (11516 12991277 C T); (11517 12991354 A G); (11518 12991382 G A); (11519 12991540
T C); (11520 12991600 T C); (11521 12991746 G A); (11522 12991835 C T); (11523 12992134 G
A); (11524 12992142 G A); (11525 12992778 G T); (11526 12993205 C T); (11527 12993418 A G); (11528
12993880 G T); (11529 12993918 G A); (11530 12993997 T C); (11531 12994150 C T); (11532 12994240
A G); (11533 12994353 G T); (11534 12994526 GA G); (11535 12995160 C T); (11536 12995543 T
C); (11537 12995840 T C); (11538 12995940 A G); (11539 12996948 A C); (11540 13003721 C A); (11541
13003849 G A); (11542 13003878 C T); (11543 13004120 C G); (11544 13004859 C G); (11545 13004967
C T); (11546 13005147 G A); (11547 13005264 T A); (11548 13005300 G A); (11549 13005303 T
C); (11550 13005304 A T); (11551 13005333 C T); (11552 13005379 C A); (11553 13005526 A C); (11554
13005996 T C); (11555 13006121 T G); (11556 13006295 C T); (11557 13006385 T C); (11558 13006480
G A); (11559 13006673 C T); (11560 13006811 A G); (11561 13006841 C G); (11562 13007376 G
A); (11563 13007458 T C); (11564 13007753 C T); (11565 13008497 C T); (11566 13008520 A
AAAACAGAC); (11567 13008576 C T); (11568 13009334 G C); (11569 13009521 C A); (11570 13009534 G
A); (11571 13009797 A G); (11572 13009865 G A); (11573 13010076 G A); (11574 13010109 C T); (11575
13010131 C T); (11576 13010630 G C); (11577 13010786 C A); (11578 13010788 T C); (11579 13011024
C T); (11580 13011213 C T); (11581 13011242 C T); (11582 13011291 C T); (11583 13011375 G A); (11584
13011596 G A); (11585 13011654 G A); (11586 13011781 G A); (11587 13011799 C T); (11588 13011867
A G); (11589 13012237 C T); (11590 13012308 C T); (11591 13012436 A C); (11592 13012492 G
A); (11593 13012659 T C); (11594 13012776 T C); (11595 13012971 C T); (11596 13013061 T TG); (11597
13013381 C T); (11598 13013490 C T); (11599 13013646 A G); (11600 13013720 T A); (11601 13013753
G T); (11602 13013904 C T); (11603 13014035 A G); (11604 13014373 G T); (11605 13014395 G
A); (11606 13014404 T C); (11607 13014755 A G); (11608 13014815 T C); (11609 13015325 A C); (11610
13015601 C T); (11611 13016142 A G); (11612 13016304 C G); (11613 13016526 C T); (11614 13016635
A G); (11615 13016772 T C); (11616 13016953 C G); (11617 13017319 TATA T); (11618 13017404 A
T); (11619 13017419 A T); (11620 13017745 C T); (11621 13017791 G A); (11622 13017823 A G); (11623
13017898 T C); (11624 13018040 T G); (11625 13018254 A T); (11626 13018574 G A); (11627 13019013
A T); (11628 13019304 G GA); (11629 13020269 A G); (11630 13020926 T TACCCCCC); (11631 13021206
C G); (11632 13021559 C A); (11633 13021560 A T); (11634 13022402 T A); (11635 13022505 C T); (11636
13023139 G A); (11637 13023166 T G); (11638 13024091 A G); (11639 13024093 T G); (11640 13024100
G A); (11641 13024422 T C); (11642 13024694 A G); (11643 13024918 G A); (11644 13025074 G
A); (11645 13025151 T C); (11646 13025710 G T); (11647 13025916 G A); (11648 13026129 A T); (11649
13026931 T C); (11650 13027404 A C); (11651 13028209 GA G); (11652 13030176 TA T); (11653
13032138 GA G); (11654 13032348 C A); (11655 13035078 T G); (11656 13035094 T C); (11657
13035150 T G); (11658 13036599 A T); (11659 13036798 T C); (11660 13036880 C T); (11661 13036906
G A); (11662 13037027 C A); (11663 13037896 T C); (11664 13038290 C G); (11665 13038612 A
G); (11666 13038727 A G); (11667 13039138 T C); (11668 13039301 G A); (11669 13039536 C T); (11670
13039592 C T); (11671 13039997 C A); (11672 13040003 G A); (11673 13040192 C G); (11674 13040214
T C); (11675 13041175 C T); (11676 13041207 A G); (11677 13041240 T C); (11678 13041946 T C); (11679
13042176 A G); (11680 13042483 A G); (11681 13043007 A C); (11682 13043099 C T); (11683 13043387
G A); (11684 13043566 C A); (11685 13043814 T C); (11686 13043942 T A); (11687 13044372 G
C); (11688 13044526 T C); (11689 13044815 GT G); (11690 13045265 G A); (11691 13045394 T G); (11692
13045436 G A); (11693 13045696 G A); (11694 13046512 T C); (11695 13046571 T C); (11696 13046689
A G); (11697 13047782 G A); (11698 13047870 C G); (11699 13048870 A G); (11700 13048872 C
T); (11701 13048973 C T); (11702 13049018 G A); (11703 13049175 A G); (11704 13049423 G A); (11705
13049565 C A); (11706 13049656 A G); (11707 13049710 CAACA C); (11708 13050709 G A); (11709
13053904 G A); (11710 13065328 T C); (11711 13065386 A G); (11712 13065676 T A); (11713 13066244
A G); (11714 13068041 C T); (11715 13068113 C T); (11716 13068357 A G); (11717 13068439 C
T); (11718 13068576 C T); (11719 13068670 A G); (11720 13068862 T C); (11721 13068908 A G); (11722
13068911 T C); (11723 13069058 G GT); (11724 13070098 T C); (11725 13070504 G A); (11726 13070696
A G); (11727 13070724 A C); (11728 13070958 A G); (11729 13071144 A G); (11730 13071384 C
CAT); (11731 13071401 G A); (11732 13071417 G A); (11733 13071934 T A); (11734 13073483 C
T); (11735 13074172 A G); (11736 13074822 A G); (11737 13075580 T A); (11738 13076811 T C); (11739
13076858 G A); (11740 13076924 A G); (11741 13076977 A G); (11742 13077174 C T); (11743 13077610
G A); (11744 13077718 T TTGAACAATATGACAA); (11745 13077766 A G); (11746 13078348 T
TAGTTAAAA); (11747 13078537 A AC); (11748 13079277 A G); (11749 13079394 A G); (11750 13079413
C T); (11751 13079417 A G); (11752 13079949 T TG); (11753 13080788 C T); (11754 13080808 G
A); (11755 13080829 C T); (11756 13081032 C T); (11757 13081309 C T); (11758 13081389 A G); (11759
13081416 G A); (11760 13081473 T C); (11761 13081826 T A); (11762 13082052 C T); (11763 13082281
G A); (11764 13083037 C T); (11765 13083161 A T); (11766 13083162 A T); (11767 13083466 AC
A); (11768 13083524 C T); (11769 13084341 A C); (11770 13084377 C T); (11771 13084409 C T); (11772
13084695 C T); (11773 13085009 G A); (11774 13085307 C T); (11775 13085543 A G); (11776 13085544
G A); (11777 13085788 T C); (11778 13085892 G A); (11779 13086678 A G); (11780 13086739 G
A); (11781 13086746 A G); (11782 13086747 A G); (11783 13086924 C T); (11784 13086945 G A); (11785
13087037 A C); (11786 13087063 G T); (11787 13087626 A C); (11788 13087988 G A); (11789 13088163
T G); (11790 13088491 A T); (11791 13089986 G A); (11792 13090190 G C); (11793 13090306 C
T); (11794 13090525 T G); (11795 13091003 A G); (11796 13091101 G A); (11797 13091566 C A); (11798
13092018 G A); (11799 13092945 A AT); (11800 13092974 A AGGG); (11801 13093355 T C); (11802
13093413 G A); (11803 13093631 G A); (11804 13093670 C T); (11805 13093677 T G); (11806 13093724
C T); (11807 13093765 A G); (11808 13094742 T C); (11809 13094801 C T); (11810 13094834 G
A); (11811 13094871 C T); (11812 13094908 A G); (11813 13094915 C A); (11814 13095057 A G); (11815
13095061 T C); (11816 13096032 GTATGCAAATA G); (11817 13096096 A G); (11818 13096130 C
T); (11819 13096780 T A); (11820 13096786 G A); (11821 13098920 T C); (11822 13098969 C T); (11823
13098988 T G); (11824 13099008 C T); (11825 13100328 C T); (11826 13101200 G A); (11827 13101206
G A); (11828 13101207 A G); (11829 13104034 A G); (11830 13104920 A G); (11831 13105427 A
G); (11832 13105462 G T); (11833 13106299 G A); (11834 13106331 C T); (11835 13106419 C T); (11836
13106700 A G); (11837 13106784 G T); (11838 13106899 C T); (11839 13106912 G A); (11840 13107003
A G); (11841 13107090 G A); (11842 13107264 G A); (11843 13107282 A AG); (11844 13107717 T
C); (11845 13107825 C A); (11846 13107961 T G); (11847 13108793 C T); (11848 13108860 TA T); (11849
13108959 G C); (11850 13109327 C A); (11851 13109376 T G); (11852 13109500 C A); (11853 13109597
A G); (11854 13109640 G T); (11855 13110010 T A); (11856 13110047 G A); (11857 13110553 C
T); (11858 13110570 C T); (11859 13110592 GA G); (11860 13110838 C G); (11861 13111156 C T); (11862
13111510 T C); (11863 13111830 C T); (11864 13111985 A G); (11865 13113572 C T); (11866 13115165
A G); (11867 13115230 G T); (11868 13115321 T C); (11869 13115496 G A); (11870 13115966 G
A); (11871 13116988 G A); (11872 13117081 A G); (11873 13117085 G A); (11874 13117498 TG
T); (11875 13117605 A G); (11876 13117846 C T); (11877 13117874 A G); (11878 13117878 T C); (11879
13117918 A G); (11880 13117957 C T); (11881 13117960 A G); (11882 13117967 T G); (11883 13118018
G A); (11884 13118055 G A); (11885 13120335 A G); (11886 13120680 A G); (11887 13121130 A
G); (11888 13121193 A G); (11889 13121340 A G); (11890 13122235 T C); (11891 13123492 G A); (11892
13123502 G A); (11893 13123529 T C); (11894 13124006 G A); (11895 13124877 G A); (11896 13124924
G A); (11897 13125881 G T); (11898 13126229 T C); (11899 13126249 G A); (11900 13126618 G
A); (11901 13126863 GC G); (11902 13126931 G A); (11903 13127083 G C); (11904 13127976 A
C); (11905 13128562 C A); (11906 13128700 A G); (11907 13128722 G A); (11908 13131558 A G); (11909
13135008 C A); (11910 13135012 T A); (11911 13135047 C A); (11912 13135053 T C); (11913 13135190
G A); (11914 13135446 C T); (11915 13135572 C A); (11916 13135792 A G); (11917 13135832 A
G); (11918 13135861 T C); (11919 13136247 C T); (11920 13136397 A G); (11921 13136485 G A); (11922
13136500 G A); (11923 13136827 C A); (11924 13136984 G C); (11925 13137151 C T); (11926 13137174
T C); (11927 13137233 G T); (11928 13137295 C T); (11929 13137614 A G); (11930 13137885 A T); (11931
13138043 A T); (11932 13138103 G C); (11933 13138121 C T); (11934 13138135 T C); (11935 13138158 C
T); (11936 13138479 G A); (11937 13138571 G A); (11938 13138784 A G); (11939 13139227 C T); (11940
13139466 G T); (11941 13139559 C T); (11942 13141849 T TAA); (11943 13142011 T C); (11944
13142348 T C); (11945 13142405 T C); (11946 13142901 A AATT); (11947 13143514 C CATGATT); (11948
13143697 T A); (11949 13144145 A G); (11950 13144154 A C); (11951 13144371 C T); (11952 13144426
C T); (11953 13144700 T G); (11954 13145878 C T); (11955 13145977 A C); (11956 13146086 G
A); (11957 13146163 T C); (11958 13146164 T C); (11959 13146417 G C); (11960 13146672 T C); (11961
13146828 C T); (11962 13149580 C T); (11963 13149869 C T); (11964 13150006 T C); (11965 13150066 T
C); (11966 13150089 G T); (11967 13150462 G A); (11968 13150531 C A); (11969 13150575 T C); (11970
13150835 A G); (11971 13150891 T C); (11972 13150906 T A); (11973 13150957 T C); (11974 13151001
G A); (11975 13151191 A G); (11976 13151969 G T); (11977 13152081 G C); (11978 13153116 A
AT); (11979 13153754 T C); (11980 13153931 G T); (11981 13154181 T C); (11982 13154348 T C); (11983
13154898 C A); (11984 13155088 A ATCTTCTTCCTTAAACACTATTGTGT); (11985 13155558 C T); (11986
13156470 C T); (11987 13156514 G A); (11988 13157415 A C); (11989 13157427 C A); (11990 13157447
T C); (11991 13157500 A G); (11992 13157671 C T); (11993 13158950 T G); (11994 13159430 G
T); (11995 13159784 G A); (11996 13160369 T A); (11997 13160377 G A); (11998 13160519 G C); (11999
13160534 C T); (12000 13160553 T G); (12001 13161110 C A); (12002 13161157 A C); (12003 13162163
T G); (12004 13162202 A G); (12005 13162515 T C); (12006 13162779 GT G); (12007 13162887 T
A); (12008 13162963 G C); (12009 13163209 G A); (12010 13163213 CTG C); (12011 13163362 AT
A); (12012 13163379 A T); (12013 13163400 C G); (12014 13163402 T C); (12015 13163410 T C); (12016
13163560 G A); (12017 13163564 A G); (12018 13163967 A T); (12019 13163974 C T); (12020 13164376
C T); (12021 13164563 G A); (12022 13164946 T C); (12023 13165151 T C); (12024 13165252 A
G); (12025 13165376 C T); (12026 13165685 G A); (12027 13166343 C G); (12028 13166394 A C); (12029
13166795 A G); (12030 13167055 CT C); (12031 13167258 A G); (12032 13167317 T A); (12033
13167597 A AT); (12034 13167807 C T); (12035 13167836 G A); (12036 13167975 G T); (12037 13168375
A C); (12038 13168656 G A); (12039 13169170 C T); (12040 13169439 G GT); (12041 13169497 C
G); (12042 13169509 T C); (12043 13169920 G T); (12044 13170076 A G); (12045 13170330 C G); (12046
13170437 A C); (12047 13170859 C T); (12048 13171212 T C); (12049 13171445 C G); (12050 13171677
G T); (12051 13171847 A AT); (12052 13172843 T C); (12053 13172884 G T); (12054 13173255 A
T); (12055 13174471 G C); (12056 13174477 A T); (12057 13175076 C A); (12058 13175547 TA T); (12059
13177672 T C); (12060 13179029 T G); (12061 13179148 G A); (12062 13179254 C T); (12063 13179453
C G); (12064 13179474 T C); (12065 13179489 T G); (12066 13179595 C T); (12067 13179747 C T); (12068
13179779 T C); (12069 13180106 C G); (12070 13180345 G A); (12071 13180460 C T); (12072 13180707
G A); (12073 13181487 A C); (12074 13181623 A G); (12075 13181718 A G); (12076 13182264 C
T); (12077 13182317 G A); (12078 13182521 T C); (12079 13182812 T C); (12080 13182983 G A); (12081
13183063 T C); (12082 13183118 AG A); (12083 13183612 G A); (12084 13183892 C A); (12085
13184248 A G); (12086 13185609 C T); (12087 13185767 A G); (12088 13186071 C T); (12089 13186438
C T); (12090 13186610 A G); (12091 13187586 A C); (12092 13188291 T A); (12093 13188432 T C); (12094
13194288 C T); (12095 13196213 G A); (12096 13198101 C T); (12097 13198162 T A); (12098 13198271
G A); (12099 13199289 G A); (12100 13199349 C T); (12101 13199487 G A); (12102 13199700 T
C); (12103 13199802 C T); (12104 13199892 A G); (12105 13199936 C T); (12106 13199937 G A); (12107
13199943 A C); (12108 13200017 C T); (12109 13200026 C T); (12110 13203031 C T); (12111 13203889 G
A); (12112 13203905 A G); (12113 13203986 T C); (12114 13204069 AG A); (12115 13204101 C T); (12116
13204274 T C); (12117 13205116 G C); (12118 13205727 C T); (12119 13205942 G A); (12120 13206060
CATTAT C); (12121 13206122 A G); (12122 13206309 T C); (12123 13206624 T C); (12124 13207665 A
G); (12125 13208346 G A); (12126 13208408 A G); (12127 13208409 A G); (12128 13208641 T C); (12129
13209045 A G); (12130 13209452 G A); (12131 13210088 C T); (12132 13210102 C G); (12133 13210106
A T); (12134 13210142 A G); (12135 13210375 A G); (12136 13211939 T G); (12137 13211994 G
A); (12138 13212039 G C); (12139 13212123 T C); (12140 13212309 G A); (12141 13212322 G A); (12142
13212603 G A); (12143 13212789 C T); (12144 13212885 A C); (12145 13212913 T G); (12146 13213087
T C); (12147 13214495 G A); (12148 13214614 T C); (12149 13214660 G A); (12150 13214984 G
A); (12151 13215772 G A); (12152 13215840 G T); (12153 13216232 C A); (12154 13216844 C T); (12155
13217393 C T); (12156 13217405 T A); (12157 13217655 A T); (12158 13217733 A G); (12159 13217835
A G); (12160 13217847 T C); (12161 13217865 C T); (12162 13217926 T C); (12163 13218287 T G); (12164
13218377 C A); (12165 13218439 G A); (12166 13218593 G C); (12167 13218625 A T); (12168 13218632
A G); (12169 13218763 T C); (12170 13218768 C G); (12171 13218948 C T); (12172 13219361 T
G); (12173 13219381 T C); (12174 13219787 T G); (12175 13219925 G A); (12176 13220032 T C); (12177
13220041 A G); (12178 13221364 G C); (12179 13221473 G A); (12180 13221642 C T); (12181 13221732
C T); (12182 13222183 C T); (12183 13222202 G A); (12184 13223186 C T); (12185 13223276 A
G); (12186 13223437 C T); (12187 13223669 T C); (12188 13223776 A G); (12189 13223837 G A); (12190
13224272 A G); (12191 13224324 G A); (12192 13224359 G A); (12193 13224434 G A); (12194 13224455
T C); (12195 13224527 C G); (12196 13224557 G A); (12197 13224636 T C); (12198 13225024 T C); (12199
13225108 C A); (12200 13225118 T C); (12201 13225212 T C); (12202 13225288 C T); (12203 13225368 T
C); (12204 13225746 C G); (12205 13225981 A G); (12206 13226129 C T); (12207 13226273 T G); (12208
13226366 G A); (12209 13226440 T C); (12210 13226720 CT C); (12211 13226813 G A); (12212 13226896
A G); (12213 13227035 A G); (12214 13227480 C T); (12215 13227717 G A); (12216 13228636 A
G); (12217 13228686 T A); (12218 13229928 G A); (12219 13229938 C T); (12220 13229986 A T); (12221
13231130 C T); (12222 13231367 A G); (12223 13231574 A G); (12224 13231598 C T); (12225 13231756
C G); (12226 13231847 A G); (12227 13232001 T C); (12228 13232456 C T); (12229 13232736 G
T); (12230 13232763 G A); (12231 13232784 C G); (12232 13233139 C T); (12233 13233372 C T); (12234
13233556 A C); (12235 13233721 A AATAT); (12236 13234565 T C); (12237 13234810 T C); (12238
13234824 G A); (12239 13235372 C T); (12240 13235952 C T); (12241 13236410 A G); (12242 13236555
T G); (12243 13236643 G A); (12244 13236681 A G); (12245 13236737 G A); (12246 13236979 G
A); (12247 13238708 A G); (12248 13238797 AAAGT A); (12249 13239102 T C); (12250 13239105 C
T); (12251 13239644 A G); (12252 13240302 T G); (12253 13240633 A C); (12254 13241293 A G); (12255
13242270 TTG T); (12256 13242727 C T); (12257 13242938 GA G); (12258 13243272 T C); (12259
13243712 G A); (12260 13243887 A G); (12261 13244108 C T); (12262 13244268 C T); (12263 13244395
G C); (12264 13244559 C T); (12265 13244596 G A); (12266 13244648 A G); (12267 13244947 A
G); (12268 13244958 C T); (12269 13245119 A G); (12270 13245135 G A); (12271 13245251 G C); (12272
13245288 G A); (12273 13246049 A G); (12274 13246121 TG T); (12275 13246467 A G); (12276
13247559 A G); (12277 13247588 G A); (12278 13248005 C T); (12279 13248657 G A); (12280 13249664
C T); (12281 13249728 G A); (12282 13249914 G A); (12283 13250015 C T); (12284 13250027 C
T); (12285 13250823 A G); (12286 13250839 C T); (12287 13251164 T C); (12288 13251364 T C); (12289
13251390 T C); (12290 13251523 G T); (12291 13251814 A G); (12292 13251880 T C); (12293 13251919
T C); (12294 13252760 A C); (12295 13252811 A G); (12296 13252860 A G); (12297 13252935 G
C); (12298 13253158 T C); (12299 13253295 G A); (12300 13253441 T C); (12301 13253771 A G); (12302
13253797 G T); (12303 13253798 T A); (12304 13255146 T G); (12305 13255177 G A); (12306 13255607
T C); (12307 13255787 G A); (12308 13256182 T C); (12309 13256498 A C); (12310 13256745 G
A); (12311 13256747 A C); (12312 13257373 C A); (12313 13257597 A G); (12314 13257905 G A); (12315
13258071 C T); (12316 13258669 T C); (12317 13258782 T C); (12318 13258826 GT G); (12319 13259435
T C); (12320 13259825 C G); (12321 13259965 A T); (12322 13260775 GT G); (12323 13260874 C
T); (12324 13261089 G GAGA); (12325 13261213 T TATGTGGCAGATGCAAGTG); (12326 13261424 A
G); (12327 13261686 G A); (12328 13262217 C T); (12329 13262454 G T); (12330 13263517 C T); (12331
13264078 T A); (12332 13264110 GA G); (12333 13264403 C A); (12334 13264519 A G); (12335
13264791 A G); (12336 13264834 TC T); (12337 13265174 A C); (12338 13265823 C T); (12339 13266160
CT C); (12340 13266275 G T); (12341 13266732 A G); (12342 13266963 C T); (12343 13266974 C
T); (12344 13267138 T A); (12345 13267460 G A); (12346 13267616 T C); (12347 13268121 A G); (12348
13268188 G T); (12349 13268346 T G); (12350 13268410 T TGA); (12351 13268536 C A); (12352
13269033 G T); (12353 13269083 C A); (12354 13270208 A G); (12355 13270606 G A); (12356 13270635
C T); (12357 13270678 G A); (12358 13271229 C T); (12359 13271416 A G); (12360 13271449 A
T); (12361 13271946 T TA); (12362 13272075 A C); (12363 13272191 G T); (12364 13272227 T C); (12365
13272381 T C); (12366 13272529 G A); (12367 13272846 C G); (12368 13273175 A G); (12369 13273346
A T); (12370 13273371 T C); (12371 13273403 C T); (12372 13273710 C A); (12373 13273812 G C); (12374
13274036 C G); (12375 13274292 A T); (12376 13274300 T C); (12377 13274529 G A); (12378 13274632
T C); (12379 13274648 T C); (12380 13274845 G T); (12381 13274962 T C); (12382 13275060 G A); (12383
13275062 A G); (12384 13276011 C CA); (12385 13276175 T C); (12386 13276650 C T); (12387 13277508
T A); (12388 13277509 A C); (12389 13278278 G A); (12390 13278518 T C); (12391 13278837 T C); (12392
13278970 G A); (12393 13279245 C A); (12394 13279318 C T); (12395 13280072 C T); (12396 13280490
AT A); (12397 13280677 A T); (12398 13280730 T A); (12399 13280735 C T); (12400 13281014 T
C); (12401 13281056 C T); (12402 13281465 C G); (12403 13281547 A G); (12404 13281597 G C); (12405
13281647 G A); (12406 13281950 G A); (12407 13282019 T C); (12408 13282142 G T); (12409 13282188
A G); (12410 13282332 C A); (12411 13282502 A C); (12412 13283454 T C); (12413 13284609 A
ACCTAAAACTAG); (12414 13284868 T C); (12415 13284870 C T); (12416 13284879 C A); (12417
13284892 G A); (12418 13284899 G A); (12419 13285211 C T); (12420 13285261 T C); (12421 13285275
C T); (12422 13285488 C G); (12423 13285763 A C); (12424 13285855 T C); (12425 13287698 C T); (12426
13287705 G A); (12427 13287826 G A); (12428 13287866 G A); (12429 13290091 T A); (12430 13290131
C G); (12431 13290301 C T); (12432 13290553 A AT); (12433 13290682 A G); (12434 13291841 T
C); (12435 13292471 G A); (12436 13292503 A G); (12437 13292521 G A); (12438 13292753 T C); (12439
13292843 A C); (12440 13292916 T TA); (12441 13293197 C A); (12442 13293402 C T); (12443 13293513
T C); (12444 13293594 C T); (12445 13294168 C T); (12446 13296297 C T); (12447 13296977 C T); (12448
13297301 G A); (12449 13297332 G A); (12450 13298307 A G); (12451 13298319 A G); (12452 13298356
C T); (12453 13298371 A G); (12454 13298373 T C); (12455 13298376 G A); (12456 13298394 T
A); (12457 13298409 C T); (12458 13298798 T C); (12459 13298802 G C); (12460 13300391 A C); (12461
13300394 C T); (12462 13300892 T C); (12463 13300899 G T); (12464 13300974 C T); (12465 13301883 C
T); (12466 13302159 A G); (12467 13302442 C T); (12468 13302620 T C); (12469 13302659 T C); (12470
13302785 G T); (12471 13302809 C A); (12472 13302858 G A); (12473 13302919 A T); (12474 13302952
C A); (12475 13303001 G A); (12476 13303021 C G); (12477 13303072 C T); (12478 13303092 A
G); (12479 13303141 A C); (12480 13303262 A T); (12481 13304574 A G); (12482 13304583 C T); (12483
13304944 T G); (12484 13304949 C A); (12485 13305153 A AT); (12486 13305198 G A); (12487
13305204 A T); (12488 13305232 T C); (12489 13305473 C T); (12490 13305596 G GT); (12491 13305610
C G); (12492 13306247 C T); (12493 13306290 T C); (12494 13306722 A AT); (12495 13307396 G
T); (12496 13308000 G A); (12497 13308081 T C); (12498 13308977 A T); (12499 13308979 G T); (12500
13310188 A G); (12501 13310229 G A); (12502 13310350 T C); (12503 13310631 G A); (12504 13310641
A T); (12505 13310865 A G); (12506 13311204 C T); (12507 13311665 G C); (12508 13311707 T
C); (12509 13311762 A AT); (12510 13311881 G A); (12511 13312073 G A); (12512 13312183 C T); (12513
13312239 G A); (12514 13312240 A T); (12515 13312241 T C); (12516 13312311 T C); (12517 13312404
C T); (12518 13312604 A G); (12519 13313637 C A); (12520 13314158 T C); (12521 13314210 C T); (12522
13314496 T C); (12523 13314723 G T); (12524 13315702 G A); (12525 13315887 G A); (12526 13315924
G C); (12527 13316519 T C); (12528 13316567 T C); (12529 13316571 T C); (12530 13316591 G T); (12531
13317298 A G); (12532 13317300 C T); (12533 13317515 A G); (12534 13317606 G A); (12535 13317771
G T); (12536 13317817 C T); (12537 13317944 T C); (12538 13317975 G A); (12539 13318160 G
C); (12540 13318173 T C); (12541 13319211 G T); (12542 13319389 A ACATGTGCGAAGCAT); (12543
13319712 G A); (12544 13319884 G GA); (12545 13319973 C T); (12546 13320048 C A); (12547
13320098 T C); (12548 13320275 G T); (12549 13320414 T C); (12550 13320529 G A); (12551 13320530
G C); (12552 13320621 C T); (12553 13321527 T C); (12554 13321592 C T); (12555 13321620 A G); (12556
13322098 G A); (12557 13322162 C T); (12558 13322268 G A); (12559 13322473 A G); (12560 13322635
G A); (12561 13322728 T C); (12562 13322798 TTGGTCAACCATC T); (12563 13323124 C T); (12564
13323365 G A); (12565 13323939 C A); (12566 13323979 C T); (12567 13324054 C T); (12568 13325195
C T); (12569 13325551 T C); (12570 13326045 C T); (12571 13327277 C A); (12572 13327594 T C); (12573
13327905 T C); (12574 13328092 T C); (12575 13328294 G A); (12576 13328446 C T); (12577 13328464 C
T); (12578 13328670 T C); (12579 13329050 T C); (12580 13329140 C G); (12581 13329793 C G); (12582
13329970 C T); (12583 13330065 T A); (12584 13330399 G A); (12585 13330567 C T); (12586 13330758
C T); (12587 13330826 A G); (12588 13331059 T TA); (12589 13331141 T G); (12590 13331503 A
G); (12591 13331631 G A); (12592 13331717 T G); (12593 13331727 C T); (12594 13332025 A G); (12595
13332820 AT A); (12596 13332901 G A); (12597 13333346 AG A); (12598 13333490 A C); (12599
13334390 T TA); (12600 13335297 C G); (12601 13337322 T A); (12602 13337480 T C); (12603 13338064
G A); (12604 13339673 A AT); (12605 13340205 G T); (12606 13340288 T G); (12607 13340810 T
A); (12608 13340847 T A); (12609 13341678 A G); (12610 13341704 G C); (12611 13342265 G A); (12612
13342438 A C); (12613 13342509 A C); (12614 13343062 A G); (12615 13343639 T C); (12616 13344260
G A); (12617 13344811 A G); (12618 13344842 A G); (12619 13345502 C T); (12620 13345506 G
A); (12621 13345552 T C); (12622 13346084 T C); (12623 13346100 G T); (12624 13346127 G A); (12625
13346128 T C); (12626 13346172 T A); (12627 13346348 C CA); (12628 13347047 G T); (12629 13347373
G GT); (12630 13347927 C T); (12631 13348243 T C); (12632 13348345 C T); (12633 13348451 T
C); (12634 13348539 C T); (12635 13348673 T C); (12636 13348740 T TA); (12637 13349060 C T); (12638
13349281 C T); (12639 13349532 C T); (12640 13349608 A G); (12641 13349654 C T); (12642 13349670 C
T); (12643 13349696 C T); (12644 13349851 A G); (12645 13350045 T C); (12646 13350100 A C); (12647
13350280 A G); (12648 13350776 GT G); (12649 13350972 C T); (12650 13351036 T C); (12651 13351260
A T); (12652 13351398 C T); (12653 13351477 AAGT A); (12654 13351478 C A); (12655 13351479 A
C); (12656 13354260 C T); (12657 13355668 T C); (12658 13356241 G T); (12659 13356250 C T); (12660
13356286 A G); (12661 13356304 G T); (12662 13356695 G C); (12663 13356834 C T); (12664 13356938
T C); (12665 13357177 C T); (12666 13357363 C T); (12667 13357370 C T); (12668 13357627 A T); (12669
13357774 A G); (12670 13358070 T C); (12671 13358075 G A); (12672 13358093 C T); (12673 13358199
C T); (12674 13358223 C T); (12675 13358322 C T); (12676 13358768 C T); (12677 13358769 T C); (12678
13358770 A C); (12679 13359036 T C); (12680 13359037 C T); (12681 13359044 C T); (12682 13359109 T
G); (12683 13359127 T A); (12684 13359281 G A); (12685 13359738 G A); (12686 13360001 C T); (12687
13360136 T C); (12688 13360304 G C); (12689 13360620 A G); (12690 13361525 T A); (12691 13361741
C A); (12692 13361742 T A); (12693 13362174 A G); (12694 13362459 C T); (12695 13362614 A
G); (12696 13363160 G GTA); (12697 13363242 G A); (12698 13363430 G A); (12699 13363607 T
A); (12700 13363825 C T); (12701 13365143 T A); (12702 13365356 C T); (12703 13365499 A G); (12704
13365957 T C); (12705 13366186 G A); (12706 13366358 A T); (12707 13367253 G GA); (12708
13368253 C G); (12709 13368291 G A); (12710 13368370 G A); (12711 13368437 C T); (12712 13368519
G A); (12713 13368530 A G); (12714 13368791 G GA); (12715 13368904 G A); (12716 13369065 A
G); (12717 13369286 G A); (12718 13369525 T C); (12719 13370371 T C); (12720 13370621 G T); (12721
13370681 A AT); (12722 13370827 TA T); (12723 13371485 T C); (12724 13371707 A G); (12725
13371717 T C); (12726 13371981 A G); (12727 13373353 A G); (12728 13373472 T C); (12729 13373626
G T); (12730 13373869 G A); (12731 13374738 A T); (12732 13374977 G A); (12733 13375018 C
T); (12734 13375690 A G); (12735 13375729 C A); (12736 13375830 A G); (12737 13376822 C T); (12738
13378089 A C); (12739 13378718 G C); (12740 13378932 C T); (12741 13380154 C T); (12742 13380244
G A); (12743 13380602 T C); (12744 13380717 C T); (12745 13380752 A T); (12746 13381034 T C); (12747
13381245 T G); (12748 13381787 C T); (12749 13381965 T C); (12750 13383029 A G); (12751 13383094
T C); (12752 13383362 T A); (12753 13384312 C T); (12754 13384625 C G); (12755 13384986 A T); (12756
13385044 C T); (12757 13385427 T C); (12758 13385492 G A); (12759 13385837 C T); (12760 13386663
G A); (12761 13386964 C G); (12762 13387558 T C); (12763 13387590 G T); (12764 13388089 G
A); (12765 13388112 G A); (12766 13388161 T G); (12767 13388796 C A); (12768 13389150 C A); (12769
13389785 A C); (12770 13389876 A C); (12771 13390162 C T); (12772 13390485 T C); (12773 13390654 T
C); (12774 13390671 A G); (12775 13390938 G A); (12776 13391549 T A); (12777 13391906 A G); (12778
13392093 G A); (12779 13392295 A C); (12780 13392403 T C); (12781 13393302 G A); (12782 13393352
G A); (12783 13393375 T C); (12784 13393435 A G); (12785 13394508 C T); (12786 13394791 G
T); (12787 13394792 T A); (12788 13395027 G A); (12789 13395403 GT G); (12790 13395871 T C); (12791
13396077 CT C); (12792 13396471 A C); (12793 13396636 T A); (12794 13396676 CAT C); (12795
13396723 A G); (12796 13396809 A G); (12797 13396980 G A); (12798 13397310 C T); (12799 13397420
G A); (12800 13397437 T C); (12801 13397506 A G); (12802 13397589 G C); (12803 13397591 A
T); (12804 13397772 A G); (12805 13397890 T A); (12806 13398795 C T); (12807 13398859 C T); (12808
13398989 C T); (12809 13399109 A G); (12810 13399119 A G); (12811 13399140 C T); (12812 13399179
A C); (12813 13399277 C T); (12814 13399286 T C); (12815 13399927 C T); (12816 13399958 C T); (12817
13400480 G A); (12818 13401305 G A); (12819 13401430 C T); (12820 13401788 G C); (12821 13401797
G C); (12822 13401812 C T); (12823 13401836 T G); (12824 13402126 T C); (12825 13402145 ATTGTT
A); (12826 13402178 C T); (12827 13403643 A AG); (12828 13403997 CT C); (12829 13404885 T
A); (12830 13406078 G A); (12831 13406592 G C); (12832 13406806 T A); (12833 13407005 T G); (12834
13407290 C T); (12835 13407675 G C); (12836 13408395 T C); (12837 13409293 T C); (12838 13409727 A
T); (12839 13409999 G A); (12840 13410053 G A); (12841 13410080 G A); (12842 13410088 A G); (12843
13410110 A AT); (12844 13410236 A AG); (12845 13410323 A G); (12846 13411641 A G); (12847
13411882 C G); (12848 13412028 C T); (12849 13412319 CGATTT C); (12850 13412686 A G); (12851
13412809 T C); (12852 13413126 T C); (12853 13413545 G A); (12854 13413601 T C); (12855 13414357 T
A); (12856 13414358 T A); (12857 13414471 A G); (12858 13414608 A C); (12859 13414619 C T); (12860
13414693 A G); (12861 13414753 C T); (12862 13414762 T C); (12863 13415263 T G); (12864 13416421
T C); (12865 13416501 TC T); (12866 13416865 C G); (12867 13417275 TC T); (12868 13417917 A
ACAGG); (12869 13418100 C A); (12870 13418117 G A); (12871 13418414 TTTG T); (12872 13418945 GA
G); (12873 13419574 C T); (12874 13419723 C T); (12875 13419813 C T); (12876 13419849 A G); (12877
13419861 T TA); (12878 13419941 A T); (12879 13420163 AT A); (12880 13420307 C A); (12881
13420375 A AT); (12882 13420449 T C); (12883 13420518 T TTA); (12884 13421157 C T); (12885
13421465 T C); (12886 13421968 A G); (12887 13422590 C T); (12888 13423195 A G); (12889 13423289
T G); (12890 13423295 C T); (12891 13423779 A C); (12892 13423907 G A); (12893 13423962 G
A); (12894 13423974 G A); (12895 13425209 G A); (12896 13425678 T C); (12897 13425713 T TA); (12898
13426315 T C); (12899 13426750 G C); (12900 13426812 T C); (12901 13426885 A G); (12902 13426908
C T); (12903 13426936 T C); (12904 13427630 T C); (12905 13428524 T A); (12906 13428678 C A); (12907
13429960 T C); (12908 13430030 G A); (12909 13430777 A G); (12910 13431256 C T); (12911 13431463
TC T); (12912 13431494 A G); (12913 13431522 G A); (12914 13432114 G T); (12915 13432183 CT
C); (12916 13432222 T G); (12917 13432315 A C); (12918 13432356 G A); (12919 13433720 C T); (12920
13434907 C A); (12921 13434958 TTATATATATATATATATATATA T); (12922 13435014 G A); (12923
13435151 T C); (12924 13435539 A G); (12925 13435651 G A); (12926 13435658 T C); (12927 13435728
A G); (12928 13436102 A G); (12929 13437038 C A); (12930 13438343 A G); (12931 13439085 G
A); (12932 13439130 G T); (12933 13440047 C G); (12934 13440301 A C); (12935 13441669 A C); (12936
13441681 A G); (12937 13441773 T G); (12938 13442247 T G); (12939 13442863 T A); (12940 13443782
AC A); (12941 13443861 A G); (12942 13444235 C T); (12943 13445264 A T); (12944 13445328 C
T); (12945 13445374 C T); (12946 13445432 T C); (12947 13445468 T C); (12948 13445650 G A); (12949
13446226 T A); (12950 13446651 T C); (12951 13447184 T C); (12952 13447256 T C); (12953 13447305 G
A); (12954 13447638 T A); (12955 13447755 G A); (12956 13447894 G A); (12957 13448923 A G); (12958
13449684 T C); (12959 13449907 A G); (12960 13451370 C A); (12961 13451804 G C); (12962 13452098
T C); (12963 13452721 T G); (12964 13453012 A G); (12965 13453228 C T); (12966 13453546 A T); (12967
13453793 C T); (12968 13454384 A C); (12969 13454620 A G); (12970 13454860 G T); (12971 13454941
AAAAGTTT A); (12972 13456558 C T); (12973 13457017 A G); (12974 13457136 C T); (12975 13457938 A
G); (12976 13458033 AC A); (12977 13458247 C T); (12978 13458308 T C); (12979 13458473 A G); (12980
13458751 G A); (12981 13459257 G A); (12982 13459294 A G); (12983 13459317 G A); (12984 13459510
T C); (12985 13459555 C T); (12986 13459591 A C); (12987 13459595 C T); (12988 13459655 G A); (12989
13460264 T G); (12990 13460301 T TG); (12991 13460667 G T); (12992 13460694 A T); (12993 13462280
GT G); (12994 13462780 T TA); (12995 13462979 A T); (12996 13463233 A G); (12997 13463965 C
T); (12998 13463966 A T); (12999 13465167 TA T); (13000 13465269 T A); (13001 13465324 T C); (13002
13465415 G C); (13003 13466193 G A); (13004 13466255 A G); (13005 13466398 C T); (13006 13466698
C T); (13007 13467152 C T); (13008 13467240 T A); (13009 13467503 AT A); (13010 13467813 T
C); (13011 13467815 T C); (13012 13467819 T C); (13013 13467821 T C); (13014 13467823 T C); (13015
13468145 A T); (13016 13468164 C T); (13017 13468303 T C); (13018 13468405 A T); (13019 13468844 C
A); (13020 13469208 A G); (13021 13469233 A C); (13022 13469234 C T); (13023 13469275 C T); (13024
13469291 A C); (13025 13469332 C T); (13026 13469499 T A); (13027 13469799 G C); (13028 13470014
C T); (13029 13470131 A C); (13030 13470164 TA T); (13031 13470307 T C); (13032 13470447 A
AT); (13033 13470571 C G); (13034 13471761 T C); (13035 13471784 TAATTG T); (13036 13471789 C
T); (13037 13471858 C CT); (13038 13471881 G C); (13039 13471908 C T); (13040 13472060 TTTG
T); (13041 13472354 G T); (13042 13472429 C G); (13043 13473183 C T); (13044 13474077 T TA); (13045
13474261 A G); (13046 13475325 T C); (13047 13475411 C A); (13048 13475462 A G); (13049 13475647
C T); (13050 13475727 C A); (13051 13475865 A G); (13052 13475866 A G); (13053 13476276 T
C); (13054 13476570 C A); (13055 13476619 T C); (13056 13476700 AT A); (13057 13476784 G A); (13058
13477144 T C); (13059 13477400 G C); (13060 13477419 A G); (13061 13477503 T TTATATATA); (13062
13477988 G A); (13063 13478217 A G); (13064 13479072 CG C); (13065 13479141 C T); (13066
13479557 A G); (13067 13480682 T C); (13068 13480795 C T); (13069 13480897 A G); (13070 13481634
A AAT); (13071 13481710 A G); (13072 13481961 G GT); (13073 13482632 TCATATTTAAATC T); (13074
13482643 T C); (13075 13483414 T G); (13076 13483685 A C); (13077 13483846 A G); (13078 13484597
T C); (13079 13484598 T C); (13080 13484629 G A); (13081 13485367 C T); (13082 13485513 A
G); (13083 13485631 C T); (13084 13485728 G A); (13085 13485827 T C); (13086 13486841 A T); (13087
13486871 G A); (13088 13486893 A G); (13089 13487028 A G); (13090 13487237 G A); (13091 13487260
A G); (13092 13487613 CT C); (13093 13487654 CAT C); (13094 13487910 T C); (13095 13488059 C
T); (13096 13488537 G A); (13097 13488699 C T); (13098 13489001 G A); (13099 13489700 T G); (13100
13489767 G GA); (13101 13490038 A G); (13102 13490441 G A); (13103 13490445 C
CAATAATAATAAT); (13104 13490698 C T); (13105 13492154 A G); (13106 13492516 G A); (13107
13493086 A G); (13108 13493240 C T); (13109 13493292 A G); (13110 13493400 C T); (13111 13493887
C T); (13112 13494026 T C); (13113 13494157 C A); (13114 13494417 G A); (13115 13494444 T C); (13116
13495147 C T); (13117 13495241 T C); (13118 13495417 C CAA); (13119 13495421 C G); (13120
13495921 C T); (13121 13496123 G A); (13122 13496746 G A); (13123 13496957 T C); (13124 13496979
T A); (13125 13497121 G C); (13126 13497537 G A); (13127 13497666 G A); (13128 13497706 G
A); (13129 13498375 A G); (13130 13498662 C A); (13131 13498772 A G); (13132 13498821 C T); (13133
13498975 A C); (13134 13499389 A G); (13135 13500811 G A); (13136 13501146 G A); (13137 13502281
C T); (13138 13502983 T G); (13139 13503168 T C); (13140 13503284 C A); (13141 13503598 A
AG); (13142 13503708 A G); (13143 13504051 AC A); (13144 13504123 T A); (13145 13504169 A
G); (13146 13504953 G T); (13147 13504999 T C); (13148 13505048 A G); (13149 13505083 C T); (13150
13505146 G T); (13151 13505337 A T); (13152 13506644 T C); (13153 13506661 C G); (13154 13507276
TTC); (13155 13507424 C T); (13156 13507962 A G); (13157 13508198 G A); (13158 13508213 G
A); (13159 13508402 C T); (13160 13508903 G A); (13161 13508920 T A); (13162 13509052 A G); (13163
13509200 G A); (13164 13509741 A G); (13165 13509758 C T); (13166 13510549 G A); (13167 13510592
A G); (13168 13510741 A T); (13169 13511035 T G); (13170 13511231 T C); (13171 13511534 T C); (13172
13511727 C A); (13173 13512105 A T); (13174 13512196 T C); (13175 13512325 G A); (13176 13512390
G A); (13177 13512530 C T); (13178 13512933 G T); (13179 13512984 GA G); (13180 13513443 A
AT); (13181 13513560 A G); (13182 13513743 GA G); (13183 13513969 TA T); (13184 13514394 A
G); (13185 13514595 C T); (13186 13514630 T A); (13187 13515036 G A); (13188 13515048 G T); (13189
13515100 C T); (13190 13515335 C T); (13191 13515469 G A); (13192 13515513 A G); (13193 13515541
C T); (13194 13515567 C T); (13195 13515579 C T); (13196 13516160 G A); (13197 13517096 C T); (13198
13518132 T TA); (13199 13518584 G A); (13200 13519023 C CAAACCCT); (13201 13519298 T C); (13202
13519438 G A); (13203 13519760 G C); (13204 13519786 C T); (13205 13519884 G A); (13206 13519950
C T); (13207 13520051 A G); (13208 13520123 G A); (13209 13520477 C T); (13210 13520606 T
G); (13211 13520688 C T); (13212 13520714 G GT); (13213 13520842 C T); (13214 13520853 C T); (13215
13521038 C T); (13216 13521263 A T); (13217 13521328 A G); (13218 13521371 T C); (13219 13521549
A G); (13220 13521560 A C); (13221 13521644 G C); (13222 13521705 A G); (13223 13521713 C
T); (13224 13522040 A C); (13225 13522232 A G); (13226 13522865 A G); (13227 13523359 A C); (13228
13523745 C G); (13229 13523833 G A); (13230 13523923 A G); (13231 13524129 C T); (13232 13524574
C T); (13233 13524645 G A); (13234 13525105 T C); (13235 13525188 C T); (13236 13525351 T C); (13237
13525688 T C); (13238 13526020 T C); (13239 13526054 T C); (13240 13526518 G T); (13241 13526794 C
T); (13242 13527000 A ATC); (13243 13527110 A G); (13244 13527119 G A); (13245 13527279 C
T); (13246 13527504 T A); (13247 13527620 T G); (13248 13527959 T G); (13249 13529154 A C); (13250
13529156 G GTGTAATGTTAATATTTTTTT); (13251 13529897 C T); (13252 13530454 T C); (13253
13530704 G A); (13254 13531327 A G); (13255 13531639 C T); (13256 13531768 T TA); (13257 13532101
T C); (13258 13532237 G A); (13259 13532247 G A); (13260 13532259 A T); (13261 13532528 G
A); (13262 13533567 G T); (13263 13533783 G A); (13264 13534087 T G); (13265 13534164 A C); (13266
13535107 T C); (13267 13535149 A G); (13268 13535246 C T); (13269 13535580 G A); (13270 13535886
C T); (13271 13536501 G T); (13272 13536519 C T); (13273 13536612 T C); (13274 13536947 G A); (13275
13538086 G C); (13276 13538116 T C); (13277 13538674 C T); (13278 13538848 C T); (13279 13538949 A
G); (13280 13538986 C T); (13281 13539526 A G); (13282 13539674 C T); (13283 13539860 G A); (13284
13540170 T C); (13285 13540989 A G); (13286 13541020 G A); (13287 13541044 G A); (13288 13541887
A G); (13289 13542402 T G); (13290 13542441 T C); (13291 13542559 A C); (13292 13543401 G
A); (13293 13543972 C T); (13294 13544046 C G); (13295 13544239 G A); (13296 13546019 C T); (13297
13546052 C T); (13298 13546697 A G); (13299 13546957 G T); (13300 13547574 T C); (13301 13548917
T C); (13302 13549067 T C); (13303 13549179 C T); (13304 13549461 T TC); (13305 13549761 C
T); (13306 13549905 T TAGA); (13307 13549944 C A); (13308 13549951 A T); (13309 13550448 A
G); (13310 13550722 A G); (13311 13550774 C A); (13312 13550859 G C); (13313 13551375 T C); (13314
13551547 T C); (13315 13551616 A C); (13316 13551668 C T); (13317 13552734 C T); (13318 13552814 T
C); (13319 13553117 A T); (13320 13554318 T C); (13321 13555043 A C); (13322 13555084 A G); (13323
13555142 T C); (13324 13555168 C T); (13325 13555947 A G); (13326 13556110 A C); (13327 13556545
C A); (13328 13556568 C A); (13329 13556640 A G); (13330 13557045 G T); (13331 13557700 T
C); (13332 13557728 G T); (13333 13557798 C T); (13334 13557815 T C); (13335 13557919 A G); (13336
13558374 G A); (13337 13558665 G A); (13338 13558926 T C); (13339 13559385 G T); (13340 13559545
G C); (13341 13560687 A G); (13342 13562100 C T); (13343 13562213 T C); (13344 13562368 T C); (13345
13563021 C T); (13346 13563209 G T); (13347 13563741 T C); (13348 13564437 T C); (13349 13564487
G A); (13350 13564590 T C); (13351 13564617 T C); (13352 13564911 T C); (13353 13566338 T
TGCAA); (13354 13566356 A G); (13355 13566491 A G); (13356 13566707 A G); (13357 13566876 T
C); (13358 13567273 C T); (13359 13567445 A AC); (13360 13567552 C T); (13361 13568294 TC
T); (13362 13568386 C T); (13363 13568423 C T); (13364 13568435 T C); (13365 13568482 G C); (13366
13568488 T C); (13367 13568792 A C); (13368 13569055 T C); (13369 13569083 G A); (13370 13569084
G A); (13371 13569190 G A); (13372 13569195 G C); (13373 13569198 T G); (13374 13569253 T
G); (13375 13569261 T C); (13376 13569302 C T); (13377 13570219 A G); (13378 13570624 C T); (13379
13570727 G C); (13380 13570792 T C); (13381 13570936 C T); (13382 13571089 T TA); (13383 13571110
T G); (13384 13571125 G A); (13385 13571231 T C); (13386 13571275 G A); (13387 13571301 C
G); (13388 13571597 C T); (13389 13571899 G A); (13390 13572582 T C); (13391 13572835 G A); (13392
13572981 A G); (13393 13573436 A T); (13394 13574385 A C); (13395 13574421 C T); (13396 13575791
A G); (13397 13575822 G T); (13398 13576130 C T); (13399 13576790 A G); (13400 13576794 C
T); (13401 13577854 C A); (13402 13578030 G A); (13403 13579953 T C); (13404 13580812 A G); (13405
13580936 C A); (13406 13582046 A G); (13407 13582270 T C); (13408 13582438 A G); (13409 13582574
A G); (13410 13582663 C A); (13411 13582699 G T); (13412 13582909 C T); (13413 13583319 T
C); (13414 13583328 G A); (13415 13583443 G A); (13416 13583720 C A); (13417 13584191 G A); (13418
13584227 C CA); (13419 13584275 G C); (13420 13584354 T C); (13421 13584393 A G); (13422
13584571 A C); (13423 13584721 T C); (13424 13584771 T C); (13425 13585262 C T); (13426 13585352 T
C); (13427 13585356 A G); (13428 13585549 T G); (13429 13585762 C A); (13430 13586191 A G); (13431
13586599 G A); (13432 13587089 C T); (13433 13587504 A G); (13434 13587795 C T); (13435 13587857
T C); (13436 13588270 C G); (13437 13599512 C G); (13438 13599700 A G); (13439 13600196 C
T); (13440 13600348 A G); (13441 13600423 A G); (13442 13601231 T C); (13443 13601279 T G); (13444
13601729 T C); (13445 13602137 T C); (13446 13602316 T C); (13447 13602321 C T); (13448 13602934 T
C); (13449 13603446 A G); (13450 13603510 T C); (13451 13603708 T C); (13452 13603806 T C); (13453
13604182 A G); (13454 13605607 C A); (13455 13605658 C T); (13456 13605770 C A); (13457 13606002
C T); (13458 13606389 A G); (13459 13606663 A T); (13460 13606925 G A); (13461 13607576 T
A); (13462 13607698 A G); (13463 13607730 T A); (13464 13607946 G T); (13465 13608057 G C); (13466
13608090 G A); (13467 13608127 CT C); (13468 13608161 A G); (13469 13608513 G A); (13470
13608857 C T); (13471 13608922 T C); (13472 13613929 A C); (13473 13618955 A AG); (13474 13619229
T C); (13475 13619429 T G); (13476 13619438 T C); (13477 13619461 A G); (13478 13619754 G
A); (13479 13619813 T G); (13480 13619850 T C); (13481 13619936 A G); (13482 13620003 G A); (13483
13620039 A G); (13484 13620061 T C); (13485 13620179 CT C); (13486 13621198 T C); (13487 13621271
T C); (13488 13621594 T C); (13489 13621818 C T); (13490 13621963 AT A); (13491 13622044 G
A); (13492 13622672 G A); (13493 13623537 T C); (13494 13623992 C T); (13495 13624011 G T); (13496
13624075 T C); (13497 13624531 T C); (13498 13625056 T C); (13499 13625165 G A); (13500 13625507
G A); (13501 13625841 A G); (13502 13625853 A C); (13503 13626175 T C); (13504 13627167 A
C); (13505 13628197 T C); (13506 13628206 C T); (13507 13628460 T A); (13508 13628585 A T); (13509
13628812 G A); (13510 13629867 G A); (13511 13630047 C T); (13512 13630851 G T); (13513 13631439
C T); (13514 13631450 C A); (13515 13631494 T C); (13516 13631517 C G); (13517 13632262 C T); (13518
13632307 G A); (13519 13632938 T C); (13520 13633307 A C); (13521 13633321 G A); (13522 13633525
C G); (13523 13633531 C A); (13524 13634739 T C); (13525 13634791 T TC); (13526 13635294 T
C); (13527 13635440 T C); (13528 13635624 G A); (13529 13635713 C T); (13530 13635861 T G); (13531
13635947 T C); (13532 13636078 T A); (13533 13636169 G A); (13534 13636778 A T); (13535 13636913
A T); (13536 13637194 C T); (13537 13637317 T TTA); (13538 13637328 G A); (13539 13637644 T
TA); (13540 13637867 AC A); (13541 13638125 A AT); (13542 13638733 C T); (13543 13638838 A
AGAAAAAAAGT); (13544 13639591 G A); (13545 13639768 A C); (13546 13639832 C T); (13547
13639879 C T); (13548 13640322 A T); (13549 13640670 T G); (13550 13640877 G A); (13551 13642255
G A); (13552 13642293 T C); (13553 13643326 C T); (13554 13644253 TA T); (13555 13644380 A
C); (13556 13644416 G C); (13557 13644688 T A); (13558 13644854 C T); (13559 13644937 T TA); (13560
13645616 C T); (13561 13645702 T G); (13562 13645767 C A); (13563 13646306 A ATGT); (13564
13646922 A G); (13565 13647366 T C); (13566 13647386 C A); (13567 13647560 C T); (13568 13647582
C T); (13569 13650655 T TTC); (13570 13650693 G A); (13571 13651049 T C); (13572 13651086 G
A); (13573 13652291 G A); (13574 13652319 T G); (13575 13652568 C T); (13576 13652945 G A); (13577
13653301 C A); (13578 13653504 A C); (13579 13654063 T C); (13580 13654087 T C); (13581 13654562 T
G); (13582 13654579 G A); (13583 13655287 T C); (13584 13655323 G A); (13585 13655706 AT
A); (13586 13655917 A G); (13587 13656412 C CTG); (13588 13656607 A G); (13589 13656727 T
C); (13590 13657975 G A); (13591 13658116 C T); (13592 13658271 G C); (13593 13658345 T C); (13594
13658363 C A); (13595 13658496 T C); (13596 13658636 A T); (13597 13658755 A G); (13598 13658793
C T); (13599 13658941 C T); (13600 13658981 C T); (13601 13658992 G A); (13602 13660198 T C); (13603
13660199 A G); (13604 13660285 G A); (13605 13660452 C G); (13606 13660603 C T); (13607 13661166
T C); (13608 13661293 G A); (13609 13661465 T C); (13610 13661562 T C); (13611 13661849 G
A); (13612 13662123 G A); (13613 13662254 C T); (13614 13662507 A G); (13615 13662626 A G); (13616
13662768 T C); (13617 13662828 G A); (13618 13664706 A G); (13619 13664959 C T); (13620 13665140
T C); (13621 13665264 A G); (13622 13665431 C T); (13623 13665446 C A); (13624 13665575 G
A); (13625 13666109 T A); (13626 13667337 T G); (13627 13667347 A G); (13628 13667385 A G); (13629
13667571 A AT); (13630 13667840 TA T); (13631 13667963 G A); (13632 13668694 A G); (13633
13673059 T C); (13634 13673645 G A); (13635 13674319 AT A); (13636 13675201 G A); (13637
13675237 A G); (13638 13676244 G A); (13639 13676791 T C); (13640 13677135 C T); (13641 13677551
G A); (13642 13677561 C T); (13643 13677594 C T); (13644 13677900 T C); (13645 13677969 G
A); (13646 13678491 G A); (13647 13678538 C T); (13648 13679199 A G); (13649 13679515 T C); (13650
13679582 G A); (13651 13679612 A G); (13652 13679763 G T); (13653 13679870 G A); (13654 13679872
T C); (13655 13679932 G A); (13656 13680045 A G); (13657 13680057 G A); (13658 13680092 C
T); (13659 13680149 C G); (13660 13680305 T A); (13661 13680393 A G); (13662 13680664 T TA); (13663
13680710 G T); (13664 13680769 A G); (13665 13680797 G A); (13666 13680810 T C); (13667 13680924
A AT); (13668 13681090 T C); (13669 13681529 C T); (13670 13681544 A G); (13671 13682622 T
C); (13672 13682639 A G); (13673 13682708 C T); (13674 13682839 C T); (13675 13683318 G T); (13676
13683406 T C); (13677 13684366 T C); (13678 13684437 G A); (13679 13684552 T C); (13680 13684568 C
T); (13681 13684699 T C); (13682 13684760 C T); (13683 13684794 T C); (13684 13684945 G A); (13685
13685202 T C); (13686 13685237 A G); (13687 13685274 G C); (13688 13685474 G A); (13689 13685540
A G); (13690 13685559 C T); (13691 13685631 A G); (13692 13685992 G A); (13693 13686070 T
G); (13694 13686081 T C); (13695 13686103 T C); (13696 13686187 A G); (13697 13686235 C A); (13698
13686279 T C); (13699 13686617 T C); (13700 13686655 G A); (13701 13686676 A T); (13702 13686860 T
A); (13703 13686911 T A); (13704 13687151 T C); (13705 13687610 TTTTTGAGGCAG T); (13706
13688492 A AC); (13707 13688956 T C); (13708 13689192 C A); (13709 13689270 T C); (13710 13689693
C T); (13711 13689797 A G); (13712 13690044 G A); (13713 13690696 A C); (13714 13690713 G
C); (13715 13690764 T C); (13716 13690877 G A); (13717 13692276 A T); (13718 13693163 G A); (13719
13694054 C T); (13720 13694103 A G); (13721 13694496 T A); (13722 13694584 C G); (13723 13694603
G A); (13724 13694679 T C); (13725 13695031 G A); (13726 13695535 C G); (13727 13696255 T
C); (13728 13696665 A C); (13729 13696984 T G); (13730 13696988 C T); (13731 13697126 C T); (13732
13697195 G A); (13733 13697201 T C); (13734 13697270 A C); (13735 13697431 T C); (13736 13697545
C T); (13737 13698184 A G); (13738 13698305 C G); (13739 13698361 G T); (13740 13698792 A
G); (13741 13698872 A G); (13742 13699157 G A); (13743 13699332 T G); (13744 13699762 G A); (13745
13700468 A C); (13746 13700531 G A); (13747 13700645 G A); (13748 13700828 A C); (13749 13700884
G A); (13750 13701149 C A); (13751 13701189 C T); (13752 13702280 A AAAT); (13753 13702307 A
C); (13754 13702883 A G); (13755 13703452 G T); (13756 13703481 A G); (13757 13704046 A G); (13758
13705743 A T); (13759 13706184 G A); (13760 13706186 T C); (13761 13706448 G A); (13762 13706663
A G); (13763 13706986 C A); (13764 13707024 C T); (13765 13707057 A T); (13766 13707097 A
G); (13767 13707398 T A); (13768 13707884 C G); (13769 13708954 C T); (13770 13709601 A G); (13771
13712105 T A); (13772 13712624 T G); (13773 13712629 C CA); (13774 13712643 C A); (13775 13712805
A G); (13776 13712806 G T); (13777 13715971 C A); (13778 13716673 T C); (13779 13716704 T
G); (13780 13729274 G T); (13781 13729872 G A); (13782 13731712 A T); (13783 13731863 C T); (13784
13732834 T C); (13785 13733256 G A); (13786 13733455 T A); (13787 13734217 C T); (13788 13734280 T
C); (13789 13734571 T C); (13790 13734617 G A); (13791 13734669 G A); (13792 13736052 T C); (13793
13737361 A G); (13794 13737733 A G); (13795 13739616 T C); (13796 13740436 TC T); (13797 13740875
C T); (13798 13741131 C T); (13799 13741415 T C); (13800 13741641 G A); (13801 13741804 G
A); (13802 13741822 T C); (13803 13741891 T C); (13804 13741923 G A); (13805 13741943 A T); (13806
13742298 T C); (13807 13742744 G A); (13808 13743619 G A); (13809 13743703 T C); (13810 13743761
T C); (13811 13743827 G A); (13812 13744170 G T); (13813 13744200 A G); (13814 13744232 G
A); (13815 13744355 A G); (13816 13744410 A G); (13817 13744744 C T); (13818 13744872 A G); (13819
13745111 A G); (13820 13745197 T C); (13821 13745289 G A); (13822 13745988 T G); (13823 13746153
T C); (13824 13746272 A G); (13825 13746408 A G); (13826 13746481 G T); (13827 13746688 T
C); (13828 13746821 T C); (13829 13747249 T C); (13830 13747549 G A); (13831 13747560 G T); (13832
13748092 A G); (13833 13748278 T C); (13834 13748290 T C); (13835 13748683 C G); (13836 13748738
T C); (13837 13748761 A T); (13838 13748912 T C); (13839 13749173 G A); (13840 13749523 G
A); (13841 13749524 T C); (13842 13749608 C T); (13843 13749857 G A); (13844 13749917 T C); (13845
13750498 A C); (13846 13750618 G A); (13847 13751529 T C); (13848 13752062 A G); (13849 13752177
G A); (13850 13752316 T C); (13851 13753331 A G); (13852 13753337 A G); (13853 13754568 C
T); (13854 13754853 A G); (13855 13754854 T C); (13856 13754904 A G); (13857 13755280 A G); (13858
13755330 G A); (13859 13755778 C T); (13860 13755869 A G); (13861 13755977 G A); (13862 13756741
T C); (13863 13756783 T C); (13864 13757096 T C); (13865 13757141 T TCCGCTTCTCCA); (13866
13757177 T C); (13867 13757209 A G); (13868 13757219 C T); (13869 13757279 G GGCCC); (13870
13760666 T G); (13871 13761384 A T); (13872 13762000 A AAATAGGGGG); (13873 13762071 G
A); (13874 13762577 CA C); (13875 13762901 A AATGAATT); (13876 13764153 G A); (13877 13765131 A
T); (13878 13766950 A G); (13879 13766991 T C); (13880 13768550 G C); (13881 13769792 A C); (13882
13771161 CT C); (13883 13771329 C A); (13884 13772281 A G); (13885 13773585 T C); (13886 13775942
G A); (13887 13776045 C T); (13888 13776277 C A); (13889 13777460 A G); (13890 13777555 T
C); (13891 13777977 A G); (13892 13778494 A G); (13893 13778620 C T); (13894 13778879 T C); (13895
13779234 A G); (13896 13780025 G A); (13897 13784668 G T); (13898 13789856 G A); (13899 13789880
A C); (13900 13792392 A G); (13901 13793553 C G); (13902 13793555 T C); (13903 13793706 C
T); (13904 13794108 C T); (13905 13794120 C T); (13906 13794313 C T); (13907 13794746 C T); (13908
13795228 A G); (13909 13795259 G A); (13910 13796074 G A); (13911 13796084 A G); (13912 13796200
C T); (13913 13796625 C A); (13914 13796769 T C); (13915 13796991 A G); (13916 13797045 C T); (13917
13797245 T A); (13918 13797304 C T); (13919 13797347 C T); (13920 13797398 T C); (13921 13797668 C
A); (13922 13797911 A G); (13923 13798418 G T); (13924 13798541 T G); (13925 13799319 T C); (13926
13799864 C G); (13927 13800181 T G); (13928 13800238 A T); (13929 13801519 A G); (13930 13802181
A G); (13931 13803421 T C); (13932 13806156 C T); (13933 13807277 C T); (13934 13807895 A
G); (13935 13808647 T A); (13936 13810279 A G); (13937 13810777 T G); (13938 13810918 G A); (13939
13811342 T C); (13940 13812936 T C); (13941 13814457 G A); (13942 13815538 G A); (13943 13817224
T C); (13944 13817599 T C); (13945 13818138 C T); (13946 13818328 C T); (13947 13818928 T C); (13948
13818931 T C); (13949 13819608 TA T); (13950 13820528 G A); (13951 13820530 T C); (13952 13821307
C T); (13953 13822123 G A); (13954 13822380 A C); (13955 13824830 G A); (13956 13825200 T
C); (13957 13825680 C T); (13958 13826896 C T); (13959 13827248 C T); (13960 13827602 C T); (13961
13828028 A C); (13962 13829251 C T); (13963 13830533 G C); (13964 13831297 A G); (13965 13831633
C T); (13966 13831684 A G); (13967 13831960 G C); (13968 13832067 G A); (13969 13832204 C
T); (13970 13832219 A G); (13971 13832737 A G); (13972 13832814 G A); (13973 13832824 C T); (13974
13832880 T C); (13975 13832975 G A); (13976 13833149 G T); (13977 13833950 T C); (13978 13834557
C T); (13979 13835004 A G); (13980 13835202 CT C); (13981 13835363 T C); (13982 13836169 CA
C); (13983 13836617 G C); (13984 13839056 T TAC); (13985 13839560 T G); (13986 13839903 A
G); (13987 13840316 C CATAT); (13988 13842118 A G); (13989 13842314 G A); (13990 13843394 C
T); (13991 13844198 A G); (13992 13844557 T G); (13993 13844959 TG T); (13994 13845475 A G); (13995
13846405 G T); (13996 13846882 T TA); (13997 13847615 A T); (13998 13849805 AT A); (13999
13849961 C G); (14000 13850319 A G); (14001 13850349 C T); (14002 13850987 G A); (14003 13854194
A AAAT); (14004 13856558 A G); (14005 13856766 C T); (14006 13856793 A G); (14007 13857822 G
A); (14008 13859645 G A); (14009 13860195 T C); (14010 13860259 G A); (14011 13860937 A G); (14012
13861940 G T); (14013 13861951 G C); (14014 13862427 G A); (14015 13862429 G A); (14016 13863377
G T); (14017 13863546 C A); (14018 13863911 T C); (14019 13864416 C T); (14020 13865020 T C); (14021
13866255 C T); (14022 13866586 T C); (14023 13866618 G C); (14024 13866736 A C); (14025 13866824
C T); (14026 13869836 C A); (14027 13869908 AT A); (14028 13870180 C T); (14029 13870211 G
A); (14030 13870233 G C); (14031 13871984 T C); (14032 13872589 A G); (14033 13873099 G A); (14034
13873163 T G); (14035 13873218 G C); (14036 13873290 C T); (14037 13873315 T A); (14038 13873340
A C); (14039 13873492 A T); (14040 13873823 C T); (14041 13875446 AG A); (14042 13876021 T
TTTGTTGTTGTTGTTG); (14043 13877105 T C); (14044 13877212 G T); (14045 13878030 C T); (14046
13878361 A G); (14047 13879381 C T); (14048 13879595 G A); (14049 13879649 A C); (14050 13879702
C T); (14051 13880183 C T); (14052 13882164 C A); (14053 13882470 G A); (14054 13882690 A T); (14055
13882811 A G); (14056 13883088 T C); (14057 13883159 G T); (14058 13883274 G A); (14059 13887179
C T); (14060 13889275 G A); (14061 13889420 C T); (14062 13890414 C A); (14063 13890446 T
G); (14064 13891884 C T); (14065 13892451 T TAAATAA); (14066 13892554 T A); (14067 13892572 T
C); (14068 13892611 A G); (14069 13892641 G T); (14070 13894021 G T); (14071 13897547 T A); (14072
13897817 T A); (14073 13897818 T A); (14074 13898548 C T); (14075 13899419 C T); (14076 13899488
AATACCACAAATTTGAT A); (14077 13900943 T C); (14078 13901439 G A); (14079 13901474 G C); (14080
13901879 A G); (14081 13901977 A G); (14082 13902159 G A); (14083 13902378 G A); (14084 13903073
T C); (14085 13903466 G A); (14086 13905616 G GT); (14087 13906025 A G); (14088 13906176 C
T); (14089 13907632 A G); (14090 13907708 A G); (14091 13908339 T G); (14092 13910058 C A); (14093
13910963 A G); (14094 13911434 G A); (14095 13911631 A T); (14096 13912298 T G); (14097 13912340
T C); (14098 13912448 C T); (14099 13912502 A G); (14100 13913063 G A); (14101 13913538 C
T); (14102 13914647 T G); (14103 13914917 G A); (14104 13916568 G A); (14105 13916797 G A); (14106
13916839 C T); (14107 13919347 T C); (14108 13919558 T G); (14109 13919649 G T); (14110 13920669 T
C); (14111 13921686 T C); (14112 13922461 T G); (14113 13924424 C T); (14114 13924684 C G); (14115
13924730 T G); (14116 13925597 A G); (14117 13925869 C A); (14118 13926041 G A); (14119 13929822
A T); (14120 13930100 A T); (14121 13930112 G A); (14122 13930571 A G); (14123 13931467 T
C); (14124 13932435 A G); (14125 13932736 G A); (14126 13933573 G A); (14127 13934428 C T); (14128
13934928 G A); (14129 13936401 G T); (14130 13936596 A G); (14131 13936736 T C); (14132 13937209
T G); (14133 13937460 GCAAAATC G); (14134 13939252 G T); (14135 13939536 G A); (14136 13942320
A G); (14137 13943260 G A); (14138 13944393 T C); (14139 13946921 A G); (14140 13947290 A
G); (14141 13947818 G A); (14142 13948434 G C); (14143 13948701 AAG A); (14144 13949439 G
A); (14145 13952881 C G); (14146 13952898 A G); (14147 13956285 CA C); (14148 13956776 C T); (14149
13957258 A G); (14150 13958611 A T); (14151 13959207 T C); (14152 13959606 T A); (14153 13960391
A T); (14154 13960472 C A); (14155 13963433 G A); (14156 13963485 T C); (14157 13963896 A
T); (14158 13964058 A G); (14159 13964147 T G); (14160 13964527 A G); (14161 13965510 G A); (14162
13967863 T G); (14163 13967996 A C); (14164 13968611 T C); (14165 13969564 A T); (14166 13971016
C T); (14167 13971874 A G); (14168 13973617 T G); (14169 13974321 C A); (14170 13974577 C
A); (14171 13974630 G A); (14172 13974720 AAAATG A); (14173 13976384 T A); (14174 13976819 A
C); (14175 13976953 T C); (14176 13977376 T A); (14177 13977490 A AAC); (14178 13978025 ATG
A); (14179 13980845 CGTAG C); (14180 13981747 G A); (14181 13982424 A G); (14182 13982510 A
AC); (14183 13982945 G T); (14184 13983338 T C); (14185 13983354 A G); (14186 13984370 C T); (14187
13984680 C G); (14188 13984719 T C); (14189 13984825 C T); (14190 13985431 CA C); (14191 13985678
T G); (14192 13986121 C T); (14193 13986645 C T); (14194 13987540 T A); (14195 13987966 C T); (14196
13987984 A T); (14197 13988002 G A); (14198 13988158 C T); (14199 13988185 T C); (14200 13988287 T
C); (14201 13988311 GC G); (14202 13990047 T C); (14203 13990100 C T); (14204 13990103 T C); (14205
13990144 T C); (14206 13990341 A G); (14207 13990379 T A); (14208 13991193 T G); (14209 13997724
G T); (14210 13997737 A G); (14211 13997773 A T); (14212 13997790 C T); (14213 14000758 T C); (14214
14000832 A T); (14215 14000930 T C); (14216 14000947 G A); (14217 14000950 C T); (14218 14000976
G C); (14219 14001453 C T); (14220 14003199 G A); (14221 14003703 A G); (14222 14003896 T
C); (14223 14004221 G A); (14224 14004497 C T); (14225 14005032 G T); (14226 14005054 T C); (14227
14005269 T G); (14228 14005312 A G); (14229 14005716 T C); (14230 14006293 A T); (14231 14006296
T C); (14232 14007319 A G); (14233 14008898 C T); (14234 14009295 A T); (14235 14010610 A T); (14236
14010768 T C); (14237 14010779 A T); (14238 14011009 T A); (14239 14011625 G A); (14240 14011749
T TA); (14241 14016733 C A); (14242 14018468 A G); (14243 14026068 AT A); (14244 14026297 T
C); (14245 14026960 A ATT); (14246 14027268 G C); (14247 14027303 C T); (14248 14027334 C
T); (14249 14027335 A G); (14250 14027351 C T); (14251 14027394 C T); (14252 14027411 G A); (14253
14027512 A G); (14254 14027921 A G); (14255 14028157 C T); (14256 14028393 A G); (14257 14029751
G A); (14258 14031254 T C); (14259 14031269 G GA); (14260 14031315 C T); (14261 14031462 G
T); (14262 14031476 C T); (14263 14032689 C A); (14264 14033886 A G); (14265 14034267 C G); (14266
14034293 T G); (14267 14034980 T C); (14268 14035026 T C); (14269 14035179 C T); (14270 14035529 A
G); (14271 14035822 C T); (14272 14036005 C G); (14273 14036149 A G); (14274 14036562 G
GA); (14275 14036630 G A); (14276 14036727 G A); (14277 14036924 GA G); (14278 14037204 C
A); (14279 14037311 T G); (14280 14037395 A G); (14281 14039163 A T); (14282 14039170 C A); (14283
14040437 A G); (14284 14041607 G C); (14285 14043786 GA G); (14286 14044938 A G); (14287
14045701 A G); (14288 14046567 G A); (14289 14046779 ATTTG A); (14290 14047127 T G); (14291
14048102 T TAG); (14292 14048105 A G); (14293 14048150 AT A); (14294 14048614 C T); (14295
14048679 A G); (14296 14048742 T C); (14297 14048827 A C); (14298 14049068 C T); (14299 14049214
C T); (14300 14050440 T C); (14301 14053603 C T); (14302 14053670 T G); (14303 14056913 GT
G); (14304 14060847 C T); (14305 14061513 T C); (14306 14062232 T C); (14307 14062267 A G); (14308
14062353 A C); (14309 14062462 C T); (14310 14062508 G A); (14311 14062639 C T); (14312 14062644
A G); (14313 14062775 G T); (14314 14063280 T A); (14315 14063283 T A); (14316 14063286 T
A); (14317 14063644 C T); (14318 14064600 T C); (14319 14064975 C A); (14320 14065116
TAATTTTTTTGTCATTTCTCA T); (14321 14065285 AT A); (14322 14065705 G T); (14323 14065922 T
TA); (14324 14066764 G A); (14325 14067413 T TA); (14326 14067515 A G); (14327 14067929 C
T); (14328 14068020 G T); (14329 14068294 G C); (14330 14068411 T G); (14331 14070490 G A); (14332
14076609 A C); (14333 14078280 C T); (14334 14079228 AC A); (14335 14079636 T A); (14336 14079864
C G); (14337 14079891 C T); (14338 14080002 T C); (14339 14080032 T A); (14340 14080751 A
AT); (14341 14080989 G A); (14342 14084026 T C); (14343 14084681 T G); (14344 14084794 A G); (14345
14086196 C T); (14346 14088955 T C); (14347 14088965 C T); (14348 14089074 C T); (14349 14089462 G
A); (14350 14093013 C G); (14351 14093266 A G); (14352 14093767 T A); (14353 14097490 G A); (14354
14102191 T C); (14355 14102953 G A); (14356 14104482 C T); (14357 14106124 T C); (14358 14106181 C
T); (14359 14107584 C CT); (14360 14110014 G C); (14361 14110824 A G); (14362 14112590 A G); (14363
14112635 A G); (14364 14114920 G A); (14365 14115798 C T); (14366 14116036 C T); (14367 14116330
C T); (14368 14116465 ATTACTAGATAACTCATTTATTG A); (14369 14116582 G A); (14370 14116639 AT
A); (14371 14117107 T C); (14372 14117134 C T); (14373 14117597 C G); (14374 14118470 T C); (14375
14118544 A G); (14376 14119498 G A); (14377 14119822 C T); (14378 14120450 A G); (14379 14121751
AATAT A); (14380 14122106 A G); (14381 14122884 T TA); (14382 14124767 G A); (14383 14125268 C
T); (14384 14128596 T G); (14385 14129343 G A); (14386 14131988 G C); (14387 14132039 C A); (14388
14134286 C T); (14389 14134814 C T); (14390 14135088 C T); (14391 14135971 T A); (14392 14136020
AT A); (14393 14137691 G T); (14394 14137754 T A); (14395 14138478 T C); (14396 14138704 T
C); (14397 14138868 T C); (14398 14144176 T TA); (14399 14144565 A T); (14400 14146191 A C); (14401
14148052 A G); (14402 14149173 TAAAAAGCCC T); (14403 14150260 A G); (14404 14150267 G
A); (14405 14152332 T TA); (14406 14152730 G A); (14407 14152864 T C); (14408 14154380 T A); (14409
14154842 C T); (14410 14155025 A G); (14411 14155114 A G); (14412 14155569 T TG); (14413
14156046 A G); (14414 14160747 A G); (14415 14160748 T C); (14416 14163302 G T); (14417 14163721
A G); (14418 14164293 C T); (14419 14165045 G A); (14420 14165060 G A); (14421 14165063 C
T); (14422 14165088 T G); (14423 14165109 T C); (14424 14168002 A G); (14425 14168423 C T); (14426
14169166 G A); (14427 14170101 C A); (14428 14170246 G GA); (14429 14170526 C
CCTGAATCCCCGCGCG); (14430 14172239 C T); (14431 14174406 G A); (14432 14176729 A G); (14433
14177093 C T); (14434 14177306 G A); (14435 14178490 G A); (14436 14180853 A G); (14437 14181242
T C); (14438 14181772 T C); (14439 14183836 G A); (14440 14186888 A G); (14441 14187030 A
G); (14442 14187189 T C); (14443 14189271 T C); (14444 14190329 A G); (14445 14191465 T C); (14446
14191743 G A); (14447 14191801 GA G); (14448 14193026 C T); (14449 14194458 T C); (14450
14195289 G A); (14451 14195371 G A); (14452 14196075 C CT); (14453 14197084 G A); (14454
14198402 A G); (14455 14198556 A G); (14456 14199578 T TA); (14457 14202060 G GA); (14458
14203273 G A); (14459 14203274 A T); (14460 14204709 A G); (14461 14205232 T C); (14462 14205260
A C); (14463 14205279 G A); (14464 14205491 A G); (14465 14205757 T C); (14466 14210713 G
A); (14467 14210848 G T); (14468 14212809 T C); (14469 14214620 G GTT); (14470 14214838 C
T); (14471 14216127 GA G); (14472 14217164 T G); (14473 14218038 T C); (14474 14218056 C T); (14475
14219670 A G); (14476 14219676 A G); (14477 14221880 G A); (14478 14221983 G T); (14479 14223497
A G); (14480 14223627 C T); (14481 14225185 A G); (14482 14225497 C A); (14483 14225567 C
T); (14484 14225621 A T); (14485 14226402 T C); (14486 14227225 T C); (14487 14227681 A T); (14488
14228802 T C); (14489 14233088 G A); (14490 14236579 G A); (14491 14238318 GA G); (14492
14238485 T C); (14493 14239294 C T); (14494 14240043 A G); (14495 14240199 C T); (14496 14241097 T
A); (14497 14241263 C T); (14498 14242625 G A); (14499 14242705 AT A); (14500 14243238 G C); (14501
14243909 T C); (14502 14244469 C G); (14503 14246043 TA T); (14504 14247238 C T); (14505 14248356
T C); (14506 14248526 T C); (14507 14248683 T C); (14508 14255007 G A); (14509 14255037 T C); (14510
14256907 G A); (14511 14257197 C T); (14512 14257387 A C); (14513 14257917 C T); (14514 14258051
C CA); (14515 14263056 T TATA); (14516 14263592 T G); (14517 14264619 C CTTTTCTAG); (14518
14266171 C T); (14519 14266255 G T); (14520 14267176 G A); (14521 14267206 C T); (14522 14267657
A G); (14523 14268847 G A); (14524 14268894 G A); (14525 14269798 G A); (14526 14269800 G
A); (14527 14271246 G C); (14528 14271250 T C); (14529 14271275 A C); (14530 14272465 CA C); (14531
14273899 G A); (14532 14274973 A T); (14533 14275045 A G); (14534 14275593 A T); (14535 14275689
T A); (14536 14275882 G A); (14537 14277599 C T); (14538 14277994 C T); (14539 14278287 T C); (14540
14278334 G A); (14541 14278695 C T); (14542 14279139 G A); (14543 14279851 TTA T); (14544
14282071 G T); (14545 14282452 G T); (14546 14286023 G A); (14547 14286677 C T); (14548 14290071
A T); (14549 14293004 T C); (14550 14293006 A G); (14551 14293286 C T); (14552 14294003 A
G); (14553 14295462 G A); (14554 14302245 T C); (14555 14303492 G A); (14556 14304896 A G); (14557
14310045 C G); (14558 14310653 A T); (14559 14310758 G A); (14560 14312175 C T); (14561 14312659
C T); (14562 14314972 T G); (14563 14316214 G A); (14564 14316525 A T); (14565 14318576 C T); (14566
14319421 C A); (14567 14319435 C T); (14568 14321162 T A); (14569 14321187 G A); (14570 14322623
C A); (14571 14322742 G A); (14572 14326137 A T); (14573 14326279 G A); (14574 14326337 A
G); (14575 14326822 T C); (14576 14328122 A G); (14577 14328802 A G); (14578 14333640 A T); (14579
14333834 A G); (14580 14335890 G GA); (14581 14338160 C T); (14582 14338392 G T); (14583
14338631 A G); (14584 14339946 C T); (14585 14340463 T C); (14586 14340485 C T); (14587 14340668
TA T); (14588 14340799 A G); (14589 14340907 T A); (14590 14340924 A C); (14591 14341008 C
G); (14592 14341045 G A); (14593 14341084 T C); (14594 14341296 AGTGAATG A); (14595 14343153 C
T); (14596 14343562 G A); (14597 14343812 C T); (14598 14344266 C T); (14599 14344680 T C); (14600
14345047 G A); (14601 14345523 A G); (14602 14346004 C T); (14603 14348317 T C); (14604 14350166
A T); (14605 14350174 C T); (14606 14350573 C T); (14607 14350760 T C); (14608 14351830 A G); (14609
14352342 C T); (14610 14357851 G A); (14611 14358098 T C); (14612 14358335 C G); (14613 14358526
C A); (14614 14361392 GA G); (14615 14364423 A G); (14616 14365646 C A); (14617 14366303 G
C); (14618 14366311 A T); (14619 14367525 TG T); (14620 14368458 T C); (14621 14368571 C T); (14622
14368990 A G); (14623 14369556 T C); (14624 14369574 C T); (14625 14370401 C T); (14626 14370435
A G); (14627 14371520 T A); (14628 14372693 C T); (14629 14373031 A C); (14630 14374001 G
A); (14631 14374413 G A); (14632 14375980 A G); (14633 14376650 C A); (14634 14379104 C T); (14635
14379723 G A); (14636 14379941 A C); (14637 14381045 T C); (14638 14381046 C T); (14639 14381892
C T); (14640 14381990 A G); (14641 14382254 C T); (14642 14385851 G A); (14643 14385881
CATCTGTGCTTGAGA C); (14644 14385961 C G); (14645 14387038 G A); (14646 14387511 T G); (14647
14388180 C T); (14648 14388274 C A); (14649 14389346 A G); (14650 14390345 A G); (14651 14401941
G C); (14652 14402985 G A); (14653 14403577 G A); (14654 14405131 G A); (14655 14405496 G
A); (14656 14405532 A G); (14657 14406669 TG T); (14658 14408326 G C); (14659 14408765 G
A); (14660 14410125 TC T); (14661 14410492 G T); (14662 14419857 A AT); (14663 14421227 C
T); (14664 14421586 C T); (14665 14421589 G A); (14666 14421639 T G); (14667 14421695 T C); (14668
14422464 G A); (14669 14423120 T G); (14670 14423579 G C); (14671 14423852 C A); (14672 14425078
A T); (14673 14425709 C T); (14674 14426059 TCTA T); (14675 14426649 A C); (14676 14427278 A
G); (14677 14428124 A G); (14678 14428402 G A); (14679 14428504 C T); (14680 14429145 T C); (14681
14430456 T C); (14682 14431153 A C); (14683 14433306 T TA); (14684 14435191 A AT); (14685
14435453 A G); (14686 14436044 G A); (14687 14436345 T TA); (14688 14436472 T C); (14689 14437160
C G); (14690 14439005 T C); (14691 14440123 A G); (14692 14440909 T A); (14693 14441481 A
G); (14694 14441490 T A); (14695 14442017 G A); (14696 14442361 C G); (14697 14443333 A G); (14698
14444177 A C); (14699 14444386 AT A); (14700 14444653 T C); (14701 14445344 TA T); (14702
14445477 A G); (14703 14445518 GT G); (14704 14445895 A AT); (14705 14446342 G A); (14706
14446678 AT A); (14707 14448394 GT G); (14708 14448619 T A); (14709 14448699 A G); (14710
14449846 C T); (14711 14450218 T C); (14712 14450252 C T); (14713 14450618 G A); (14714 14452190 T
TGGGTTTAGGGTTTA); (14715 14456050 C T); (14716 14458716 C T); (14717 14458963 G A); (14718
14459609 C T); (14719 14459616 C T); (14720 14459814 T C); (14721 14459888 A G); (14722 14460805
G A); (14723 14461158 A T); (14724 14461237 T TA); (14725 14461439 A G); (14726 14461517 G
A); (14727 14461570 C CA); (14728 14461612 ATT A); (14729 14461681 A T); (14730 14463807 TA
T); (14731 14463991 G A); (14732 14464441 A T); (14733 14465543 G A); (14734 14465851 T G); (14735
14467764 T C); (14736 14467828 T TTATA); (14737 14468337 GT G); (14738 14468429 C A); (14739
14470342 T C); (14740 14471453 T C); (14741 14473032 G GT); (14742 14473816 G GAA); (14743
14475122 T A); (14744 14476833 T G); (14745 14477927 C T); (14746 14477997 T C); (14747 14481086 A
T); (14748 14481143 A G); (14749 14482774 G T); (14750 14487684 C T); (14751 14487904 A C); (14752
14488403 C G); (14753 14489833 A G); (14754 14489856 A G); (14755 14491343 A C); (14756 14491739
G A); (14757 14492260 G A); (14758 14492339 G A); (14759 14493178 T C); (14760 14494131 T
G); (14761 14495211 C T); (14762 14496238 G A); (14763 14496380 G A); (14764 14497581 C A); (14765
14501500 C T); (14766 14504035 G A); (14767 14506493 CA C); (14768 14508683 A G); (14769
14509250 C T); (14770 14510042 G C); (14771 14511917 G A); (14772 14513758 C T); (14773 14513956
G A); (14774 14515756 A G); (14775 14516887 G C); (14776 14516888 A G); (14777 14516889 A
G); (14778 14517018 CG C); (14779 14517070 C T); (14780 14517073 T C); (14781 14517785 T C); (14782
14518798 T C); (14783 14519783 T G); (14784 14519873 G T); (14785 14520700 C T); (14786 14521602
G A); (14787 14522446 T C); (14788 14526213 G A); (14789 14527038 G A); (14790 14527041 G
A); (14791 14527194 A G); (14792 14527736 C T); (14793 14527792 C T); (14794 14529057 A G); (14795
14533391 G C); (14796 14534894 T G); (14797 14539011 G A); (14798 14539025 A G); (14799 14539695
C A); (14800 14540986 A G); (14801 14541841 GA G); (14802 14543206 A C); (14803 14545588 AT
A); (14804 14547205 T A); (14805 14548777 G A); (14806 14554313 T G); (14807 14554527 G A); (14808
14554584 T A); (14809 14555008 C CT); (14810 14555963 T TA); (14811 14556272 CA C); (14812
14556728 TT AA); (14813 14558126 A G); (14814 14558283 A G); (14815 14559818 T TA); (14816
14559891 G T); (14817 14560183 G A); (14818 14560322 G A); (14819 14560396 T A); (14820 14560474
TA T); (14821 14561373 TA T); (14822 14567603 A G); (14823 14568617 C T); (14824 14569213 GTATA
G); (14825 14569561 A C); (14826 14569589 A T); (14827 14569593 A T); (14828 14569662 C A); (14829
14570020 G A); (14830 14570893 C T); (14831 14571002 A G); (14832 14571436 C T); (14833 14571535
C T); (14834 14571747 G A); (14835 14572085 T C); (14836 14573188 T C); (14837 14575149 C G); (14838
14575383 A G); (14839 14575626 C T); (14840 14580759 G T); (14841 14580963 C T); (14842 14581911
G A); (14843 14582083 A C); (14844 14582137 G C); (14845 14585800 A C); (14846 14587428 A
G); (14847 14588479 C G); (14848 14590603 AG A); (14849 14591852 A G); (14850 14593109 G
A); (14851 14594159 C T); (14852 14594307 T G); (14853 14595297 G A); (14854 14595690 G C); (14855
14595727 C CA); (14856 14597848 A G); (14857 14603422 TA T); (14858 14607603 T G); (14859
14609092 C T); (14860 14609307 T C); (14861 14611823 C A); (14862 14614939 GTATTTT G); (14863
14617802 G C); (14864 14617906 A G); (14865 14619033 A G); (14866 14619075 C T); (14867 14620588
C T); (14868 14620667 T G); (14869 14620745 A C); (14870 14621897 A C); (14871 14622001 A
C); (14872 14622232 A G); (14873 14623556 T C); (14874 14623557 C T); (14875 14623663 TAC
T); (14876 14623677 C T); (14877 14623706 A G); (14878 14623709 A G); (14879 14625011 T A); (14880
14629340 AGCAAGATTGGTG A); (14881 14632507 T C); (14882 14632921 A G); (14883 14635693 G
A); (14884 14636751 C T); (14885 14637876 C T); (14886 14638614 G A); (14887 14638755 C G); (14888
14640088 C T); (14889 14640206 A T); (14890 14640511 T A); (14891 14642973 A G); (14892 14645439
T A); (14893 14646081 A G); (14894 14650604 A G); (14895 14650949 T C); (14896 14651322 A
T); (14897 14651398 C T); (14898 14652275 T A); (14899 14652470 G A); (14900 14654414 C T); (14901
14659148 T A); (14902 14660454 G A); (14903 14661835 A G); (14904 14661844 C A); (14905 14661861
G A); (14906 14662360 A G); (14907 14662692 A G); (14908 14663036 T C); (14909 14665766 A
C); (14910 14669494 T C); (14911 14669750 A G); (14912 14671812 TCA T); (14913 14672391 C
A); (14914 14674658 T C); (14915 14675825 C T); (14916 14675945 C G); (14917 14677975 C A); (14918
14678194 T C); (14919 14680165 G T); (14920 14680485 T TAC); (14921 14680507 T C); (14922
14680584 T C); (14923 14681276 C A); (14924 14681732 G A); (14925 14682023 T A); (14926 14685305
T A); (14927 14685404 ACTT A); (14928 14685787 T G); (14929 14688303 C T); (14930 14688515 C
A); (14931 14688550 TA T); (14932 14689261 T G); (14933 14689307 C T); (14934 14692082 T C); (14935
14693558 G A); (14936 14694183 C T); (14937 14694538 T C); (14938 14695199 TCA T); (14939
14697653 G A); (14940 14703702 G A); (14941 14704271 G A); (14942 14708366 A C); (14943 14708767
T C); (14944 14715112 T G); (14945 14723276 T C); (14946 14723280 C A); (14947 14723283 T C); (14948
14723287 G A); (14949 14723502 G A); (14950 14728048 A G); (14951 14728174 A G); (14952 14728896
T G); (14953 14730387 T A); (14954 14731016 T C); (14955 14731450 AG A); (14956 14731778 G
A); (14957 14731834 G A); (14958 14732221 T G); (14959 14732723 C CA); (14960 14734539 G
A); (14961 14736279 C T); (14962 14736492 A AT); (14963 14739400 A C); (14964 14740038 C T); (14965
14740197 C A); (14966 14740326 C T); (14967 14740498 A G); (14968 14745087 G A); (14969 14745105
T C); (14970 14745587 A G); (14971 14748522 A G); (14972 14750950 G T); (14973 14751298 G
T); (14974 14753789 G A); (14975 14753927 C T); (14976 14754200 T C); (14977 14755222 G A); (14978
14755362 T TGTGGCGCCAGGGGCGCCAGA); (14979 14755559 A C); (14980 14756512 T C); (14981
14758936 T C); (14982 14759005 C T); (14983 14760139 C T); (14984 14760541 T C); (14985 14761262 A
G); (14986 14761879 A G); (14987 14762847 T C); (14988 14763816 G A); (14989 14766949 T C); (14990
14768406 A G); (14991 14769463 T C); (14992 14771251 A C); (14993 14771519 C T); (14994 14771567
T C); (14995 14772193 CA C); (14996 14777316 C T); (14997 14778611 C T); (14998 14778812 T
C); (14999 14780460 C A); (15000 14780637 GTAATCGATTAT G); (15001 14781088 G GA); (15002
14781705 G C); (15003 14782200 T C); (15004 14783329 G A); (15005 14784514 T C); (15006 14785057
C T); (15007 14786735 A AC); (15008 14786908 A ACATCGATTTTT); (15009 14786977 AG A); (15010
14792871 C A); (15011 14792905 G A); (15012 14795831 G A); (15013 14799067 C T); (15014 14801955
C T); (15015 14802976 A G); (15016 14804032 T C); (15017 14804153 C T); (15018 14805466 G
GA); (15019 14805666 C A); (15020 14806137 AAT A); (15021 14807586 T C); (15022 14807662 G
C); (15023 14808097 A T); (15024 14808593 A AT); (15025 14811014 G A); (15026 14811211 A
AT); (15027 14811499 G A); (15028 14811500 G A); (15029 14814064 C T); (15030 14814703 G
A); (15031 14816466 G A); (15032 14816558 T C); (15033 14816613 G A); (15034 14816638 T C); (15035
14816665 G T); (15036 14817005 A G); (15037 14817104 G A); (15038 14819854 T C); (15039 14820038
T C); (15040 14820643 C A); (15041 14821230 A C); (15042 14822547 T C); (15043 14823575 C
CT); (15044 14823689 T C); (15045 14823959 A C); (15046 14826167 G GT); (15047 14826845 TA
T); (15048 14827233 G T); (15049 14827623 G A); (15050 14828761 A AT); (15051 14829132 T C); (15052
14829405 T C); (15053 14831024 G A); (15054 14831082 C T); (15055 14831531 T C); (15056 14831746
AT A); (15057 14834166 CA C); (15058 14834581 C T); (15059 14835808 T C); (15060 14839180 G
A); (15061 14839268 G A); (15062 14839739 A C); (15063 14840119 G A); (15064 14842842 C T); (15065
14842866 C T); (15066 14843452 A T); (15067 14844250 A T); (15068 14844540 G GT); (15069 14845222
AT A); (15070 14845400 C T); (15071 14848459 TCC T); (15072 14849422 G A); (15073 14852619 G
T); (15074 14855719 A T); (15075 14856103 AT A); (15076 14856990 ATTT A); (15077 14857573 A
G); (15078 14857647 A C); (15079 14858928 T G); (15080 14859525 G A); (15081 14859641 C T); (15082
14859713 T TGCCCCAAGCGTGGGTTCCCAC); (15083 14860580 G A); (15084 14862823 A T); (15085
14862956 T G); (15086 14863021 C T); (15087 14863368 C T); (15088 14864653 AT A); (15089 14864844
G C); (15090 14864994 G A); (15091 14865974 A T); (15092 14866167 G A); (15093 14866584 C
T); (15094 14866677 T TAA); (15095 14868367 C T); (15096 14869229 A C); (15097 14870003 A
C); (15098 14874279 T C); (15099 14874539 C T); (15100 14875906 A G); (15101 14875925 C A); (15102
14876284 G A); (15103 14876438 AG A); (15104 14876858 A G); (15105 14877078 A T); (15106
14877443 A C); (15107 14878301 A G); (15108 14878371 TA T); (15109 14878814 T G); (15110 14881915
A T); (15111 14886800 T C); (15112 14888046 C T); (15113 14890322 T C); (15114 14890592 A
AC); (15115 14890739 A AATATATAT); (15116 14890853 T C); (15117 14890870 TGTCTATCATTATTA
T); (15118 14890936 A G); (15119 14892045 C T); (15120 14892309 G C); (15121 14892499 T C); (15122
14893304 G C); (15123 14896156 T C); (15124 14896467 G A); (15125 14896619 G C); (15126 14897592
TTA T); (15127 14898398 C T); (15128 14898958 A AT); (15129 14899004 T C); (15130 14900359 G
A); (15131 14900371 G GT); (15132 14901855 G C); (15133 14904602 C T); (15134 14906341 C T); (15135
14906359 C T); (15136 14906815 C T); (15137 14907423 C T); (15138 14909018 G A); (15139 14909309
G A); (15140 14909668 C T); (15141 14909920 G A); (15142 14910402 A AT); (15143 14910732 G
A); (15144 14910851 A AC); (15145 14912699 G T); (15146 14913442 G A); (15147 14913741 C
G); (15148 14915004 C A); (15149 14915133 A T); (15150 14917001 G A); (15151 14917369 A G); (15152
14917447 A ACC); (15153 14918657 C T); (15154 14919578 C T); (15155 14919596 G A); (15156
14926626 G A); (15157 14928317 C CT); (15158 14929968 G A); (15159 14930530 T G); (15160
14931604 C CACAT); (15161 14934174 T C); (15162 14934878 C T); (15163 14935161 T A); (15164
14935210 A G); (15165 14939023 C T); (15166 14941145 A G); (15167 14942472 T C); (15168 14942578
G A); (15169 14944416 A AT); (15170 14946046 T C); (15171 14947465 G A); (15172 14947512 A
C); (15173 14947558 C T); (15174 14947748 C T); (15175 14947825 A G); (15176 14949503 G A); (15177
14949925 C T); (15178 14950505 C A); (15179 14950629 G GA); (15180 14951303 C T); (15181 14952687
A G); (15182 14952926 A G); (15183 14953158 GA G); (15184 14953172 T G); (15185 14953510 C
T); (15186 14953572 CA C); (15187 14953586 C T); (15188 14953794 CT C); (15189 14953797 C
G); (15190 14956423 C T); (15191 14957984 G A); (15192 14958626 G T); (15193 14962946 G A); (15194
14963196 A G); (15195 14963376 C T); (15196 14963428 T A); (15197 14963447 C T); (15198 14964198
A G); (15199 14965031 C A); (15200 14965086 C T); (15201 14965442 G A); (15202 14967873 G
T); (15203 14967940 C G); (15204 14968510 G A); (15205 14968538 G A); (15206 14970563 T C); (15207
14971684 G T); (15208 14971906 A C); (15209 14973738 G A); (15210 14977179 G A); (15211 14982473
A G); (15212 14982603 A C); (15213 14983418 A G); (15214 14984430 C T); (15215 14984488 G
A); (15216 14984774 C A); (15217 14984808 C T); (15218 14986461 C T); (15219 14986514 C A); (15220
14986702 T C); (15221 14986735 G A); (15222 14986873 C T); (15223 14987132 A C); (15224 14987271
T C); (15225 14987435 C T); (15226 14987466 G A); (15227 14989591 G A); (15228 14996330 T
C); (15229 14996332 A T); (15230 14996334 A T); (15231 15002243 G A); (15232 15006169 T A); (15233
15006704 T G); (15234 15009612 A T); (15235 15009756 A G); (15236 15010406 A AT); (15237
15012870 A G); (15238 15013932 G A); (15239 15014389 T C); (15240 15016144 T A); (15241 15016186
G A); (15242 15016246 G A); (15243 15016255 C T); (15244 15016377 C T); (15245 15016399 G
A); (15246 15016409 C T); (15247 15016432 C T); (15248 15016437 A G); (15249 15016443 A C); (15250
15016931 G A); (15251 15017632 G A); (15252 15017971 G T); (15253 15018290 T C); (15254 15018296
AG A); (15255 15018321 A G); (15256 15018333 A G); (15257 15019221 A G); (15258 15022502 G
A); (15259 15024149 G A); (15260 15024406 A C); (15261 15025706 A G); (15262 15025967 T C); (15263
15026306 G A); (15264 15026948 T C); (15265 15031415 GT G); (15266 15031451 C A); (15267
15035134 G T); (15268 15035139 A G); (15269 15035164 C A); (15270 15035202 C T); (15271 15036688
G A); (15272 15039427 A T); (15273 15043983 GT G); (15274 15044019 C A); (15275 15046737 C
T); (15276 15047185 A G); (15277 15047219 A G); (15278 15047281 G A); (15279 15047288 A T); (15280
15047483 C T); (15281 15047504 A G); (15282 15049160 C T); (15283 15055239 T C); (15284 15057264
G T); (15285 15057625 C T); (15286 15057635 T C); (15287 15059959 A C); (15288 15060038 T C); (15289
15060818 T A); (15290 15065101 A G); (15291 15065126 A T); (15292 15067303 A G); (15293 15071872
T C); (15294 15073756 G GA); (15295 15073892 A C); (15296 15077070 C A); (15297 15077432 G
T); (15298 15079615 C T); (15299 15080102 A C); (15300 15080186 A T); (15301 15080224 TAA
T); (15302 15080527 A G); (15303 15080809 T C); (15304 15081728 A G); (15305 15081963 G A); (15306
15081970 AC A); (15307 15082200 A C); (15308 15083027 A AC); (15309 15083088 A AT); (15310
15083524 A T); (15311 15085975 C T); (15312 15086507 T C); (15313 15087900 G A); (15314 15088359 T
G); (15315 15088596 A G); (15316 15089396 C T); (15317 15090581 C T); (15318 15094314 G T); (15319
15095555 G A); (15320 15095991 T G); (15321 15096178 T C); (15322 15096557 T C); (15323 15098083
T C); (15324 15099154 A C); (15325 15099226 T C); (15326 15099380 A G); (15327 15099456 G
A); (15328 15100137 A G); (15329 15101154 T C); (15330 15102897 C T); (15331 15103094 G A); (15332
15105548 C T); (15333 15105838 C T); (15334 15109162 G A); (15335 15111615 C T); (15336 15113739
A G); (15337 15113874 G A); (15338 15114569 G A); (15339 15117334 G A); (15340 15118533 G
T); (15341 15118761 G A); (15342 15119075 T A); (15343 15119409 T C); (15344 15121066 C G); (15345
15121226 A AC); (15346 15127321 A G); (15347 15127347 C G); (15348 15127478 C T); (15349
15127911 T C); (15350 15131105 G A); (15351 15131230 C T); (15352 15133016 C T); (15353 15135281 T
C); (15354 15138270 A AC); (15355 15141046 C G); (15356 15142030 G T); (15357 15144377 C T); (15358
15144476 C T); (15359 15144710 A G); (15360 15144794 G A); (15361 15147009 A ACT); (15362
15156775 G A); (15363 15157368 C T); (15364 15157427 A G); (15365 15160204 A G); (15366 15160478
C T); (15367 15161117 G A); (15368 15161121 A T); (15369 15161123 A ATT); (15370 15162020 A
T); (15371 15165012 G A); (15372 15165481 C T); (15373 15166157 T C); (15374 15169670 A AT); (15375
15169874 T TG); (15376 15170758 CA C); (15377 15170898 C T); (15378 15171016 A G); (15379
15171050 A T); (15380 15171688 T C); (15381 15175550 T G); (15382 15175610 C T); (15383 15175707 A
G); (15384 15176290 C T); (15385 15176855 G A); (15386 15177054 TAATG T); (15387 15177708 T
G); (15388 15177910 G A); (15389 15178951 G A); (15390 15178961 C T); (15391 15180686 C A); (15392
15181603 A G); (15393 15181692 G A); (15394 15182618 A G); (15395 15182948 A T); (15396 15183086
G A); (15397 15183237 C T); (15398 15183436 G A); (15399 15183649 C T); (15400 15183693 A
G); (15401 15183710 A T); (15402 15186894 T C); (15403 15188008 A C); (15404 15188383 G A); (15405
15190106 G A); (15406 15190875 A G); (15407 15190992 G A); (15408 15191984 C T); (15409 15192495
G T); (15410 15194883 C T); (15411 15194915 AT A); (15412 15196016 A G); (15413 15196090 G
A); (15414 15196194 C T); (15415 15196285 G C); (15416 15199228 A G); (15417 15201667 T C); (15418
15204800 T A); (15419 15206325 A G); (15420 15206890 G A); (15421 15207410 C A); (15422 15207448
G A); (15423 15207941 A G); (15424 15208424 G A); (15425 15209813 AGG A); (15426 15210093 CT
C); (15427 15210231 GA G); (15428 15210286 A AAAGTTTTAT); (15429 15210762 A G); (15430
15214037 C G); (15431 15214154 A G); (15432 15216446 T G); (15433 15218934 T C); (15434 15219501
ATG A); (15435 15219834 G A); (15436 15220102 C T); (15437 15220294 A G); (15438 15223943 A
G); (15439 15227885 C A); (15440 15228070 C T); (15441 15230195 TTA T); (15442 15230546 T
C); (15443 15231666 T G); (15444 15231998 G T); (15445 15234279 C T); (15446 15235082 C T); (15447
15235219 A T); (15448 15238322 G A); (15449 15238812 G A); (15450 15239909 C G); (15451 15241867
CAAAATATG C); (15452 15244483 T A); (15453 15244574 T TA); (15454 15248332 G T); (15455 15249139
T C); (15456 15256689 C T); (15457 15256758 T TC); (15458 15257309 C T); (15459 15257554 TC
T); (15460 15258860 A G); (15461 15259319 T C); (15462 15260033 AT A); (15463 15261536 T C); (15464
15261746 G C); (15465 15265033 A C); (15466 15266292 C T); (15467 15267112 T G); (15468 15267186
A G); (15469 15267414 C T); (15470 15267728 C T); (15471 15267733 C T); (15472 15267762 A
G); (15473 15267784 C T); (15474 15267842 T C); (15475 15267843 G A); (15476 15268132 T G); (15477
15270659 A G); (15478 15271909 G A); (15479 15271912 T G); (15480 15272013 C A); (15481 15272230
AG A); (15482 15272284 G A); (15483 15273073 T TTATA); (15484 15273428 CA C); (15485 15275611 T
C); (15486 15276054 G A); (15487 15276547 T C); (15488 15276855 T C); (15489 15276890 G A); (15490
15276945 C T); (15491 15277234 A G); (15492 15277642 AC A); (15493 15278341 A G); (15494
15279125 T C); (15495 15279758 G A); (15496 15279872 C T); (15497 15280088 C T); (15498 15281153 C
A); (15499 15281231 T C); (15500 15281525 C A); (15501 15282305 T C); (15502 15283280 C T); (15503
15283493 C T); (15504 15284806 T TA); (15505 15285082 T C); (15506 15285957 C T); (15507 15286080
T C); (15508 15286192 G A); (15509 15287274 C T); (15510 15288467 AC A); (15511 15289052 C
T); (15512 15291880 AT A); (15513 15292867 G A); (15514 15294152 T C); (15515 15295633 T C); (15516
15296328 C A); (15517 15299041 A C); (15518 15301305 C T); (15519 15303946 G A); (15520 15304074
G A); (15521 15304262 T C); (15522 15306230 C T); (15523 15306266 C T); (15524 15306931 A T); (15525
15306968 C T); (15526 15309772 C CGAATCGCGCG); (15527 15310576 T C); (15528 15311621 A
G); (15529 15312100 G A); (15530 15312725 G T); (15531 15312898 C T); (15532 15312901 A G); (15533
15314757 A G); (15534 15315455 T C); (15535 15316128 C A); (15536 15316616 T G); (15537 15317204
G A); (15538 15317609 G A); (15539 15317646 G T); (15540 15317648 T C); (15541 15318110 G
A); (15542 15318421 T C); (15543 15321828 A G); (15544 15322206 G A); (15545 15322272 G A); (15546
15322935 G T); (15547 15322970 A T); (15548 15324621 TA T); (15549 15326068 G A); (15550 15335054
A C); (15551 15335295 A G); (15552 15335328 G A); (15553 15336162 T C); (15554 15336219 T
C); (15555 15336348 G A); (15556 15337467 C T); (15557 15337486 C T); (15558 15337841 A C); (15559
15341924 A G); (15560 15343635 G A); (15561 15343793 G C); (15562 15345517 A G); (15563 15345637
G A); (15564 15345641 C T); (15565 15345876 C T); (15566 15346058 G A); (15567 15346406 C
A); (15568 15347257 C T); (15569 15347593 C T); (15570 15348643 A G); (15571 15348713 A G); (15572
15348815 A AT); (15573 15349058 A G); (15574 15349157 G T); (15575 15349465 A C); (15576
15349796 G T); (15577 15350207 A C); (15578 15351927 T A); (15579 15352471 G A); (15580 15352885
A G); (15581 15353490 T A); (15582 15354018 C A); (15583 15354038 C A); (15584 15354355 T
A); (15585 15358868 T C); (15586 15359370 G A); (15587 15360639 C CT); (15588 15360668 T G); (15589
15360717 T C); (15590 15360926 A AT); (15591 15361039 G A); (15592 15361928 A G); (15593
15361932 G A); (15594 15362208 C T); (15595 15362570 C T); (15596 15362632 A C); (15597 15364163
A G); (15598 15364804 T C); (15599 15366946 A G); (15600 15366950 A C); (15601 15368742 C
T); (15602 15369109 C T); (15603 15375544 C T); (15604 15376490 G A); (15605 15376803 A G); (15606
15379953 C T); (15607 15380014 A G); (15608 15381046 G A); (15609 15382305 CT C); (15610 15383017
C T); (15611 15383041 C T); (15612 15384728 AC A); (15613 15384926 C T); (15614 15386066 T
C); (15615 15386666 T TA); (15616 15387032 A T); (15617 15387138 T C); (15618 15388195 G T); (15619
15388435 C G); (15620 15390136 A G); (15621 15392385 C CGCGGGTCGCGCCGCACCCCAA); (15622
15394632 G A); (15623 15397003 A G); (15624 15397108 C T); (15625 15397380 C T); (15626 15404406
G C); (15627 15404710 C T); (15628 15405155 G A); (15629 15408672 C T); (15630 15409179 C T); (15631
15409186 T C); (15632 15411386 A C); (15633 15411994 G A); (15634 15420954 A C); (15635 15423294
G C); (15636 15424109 C T); (15637 15424393 G A); (15638 15424749 G A); (15639 15426436 T
C); (15640 15426797 A G); (15641 15426969 C T); (15642 15427189 A G); (15643 15427484 A T); (15644
15428319 T C); (15645 15428548 C A); (15646 15430558 C T); (15647 15434399 C T); (15648 15438885 A
AGAAACT); (15649 15439263 C T); (15650 15440347 G GAAAAATCGTCATCGTATGTT); (15651 15443525
A G); (15652 15444121 C T); (15653 15444781 C T); (15654 15444866 C T); (15655 15445070 C G); (15656
15445310 A G); (15657 15445634 G A); (15658 15445943 G A); (15659 15446348 T C); (15660 15447936
C T); (15661 15448170 C A); (15662 15449005 C T); (15663 15449304 G A); (15664 15450019 G
A); (15665 15450044 G A); (15666 15450177 A G); (15667 15451613 A G); (15668 15453241 T C); (15669
15453243 G T); (15670 15453247 A G); (15671 15453374 A AT); (15672 15455346 T C); (15673 15457342
T C); (15674 15457436 GTT G); (15675 15459860 C A); (15676 15460672 G A); (15677 15461899 T
C); (15678 15464970 G C); (15679 15466300 C T); (15680 15466858 T C); (15681 15471554 A C); (15682
15474562 A C); (15683 15474794 C A); (15684 15476789 C A); (15685 15477201 A C); (15686 15477468
C T); (15687 15478001 A C); (15688 15481340 C T); (15689 15481518 A C); (15690 15481887 T C); (15691
15482034 A G); (15692 15482263 A G); (15693 15482374 C T); (15694 15482463 AT A); (15695
15487193 A G); (15696 15488130 A G); (15697 15488250 C T); (15698 15488278 G A); (15699 15488860
A T); (15700 15489069 T C); (15701 15489088 A AT); (15702 15489229 A AT); (15703 15489658 T
TAG); (15704 15489865 C T); (15705 15489895 T C); (15706 15490236 A G); (15707 15491523 A
G); (15708 15491973 C T); (15709 15492216 T TA); (15710 15492739 TA T); (15711 15493263 C
T); (15712 15493303 G A); (15713 15493491 A G); (15714 15494078 G A); (15715 15494194 C T); (15716
15494262 G A); (15717 15494454 T G); (15718 15495014 A G); (15719 15499246 C CA); (15720
15499768 T C); (15721 15499950 C T); (15722 15500125 T C); (15723 15500462 A G); (15724 15503477
G A); (15725 15503610 G A); (15726 15505792 T A); (15727 15505796 TCAA T); (15728 15506941 A
C); (15729 15509635 C T); (15730 15512046 T G); (15731 15512386 C T); (15732 15512830 A G); (15733
15512989 A G); (15734 15512999 C A); (15735 15513708 A G); (15736 15513720 A T); (15737 15514168
G A); (15738 15514339 T G); (15739 15514466 A G); (15740 15517971 A T); (15741 15519590 T
C); (15742 15520324 T G); (15743 15520700 G A); (15744 15520890 T G); (15745 15520891 T A); (15746
15520892 G A); (15747 15521499 T C); (15748 15521681 G A); (15749 15521723 T C); (15750 15522250
C G); (15751 15522812 G A); (15752 15522844 T C); (15753 15523266 G GC); (15754 15523307 C
T); (15755 15525206 C A); (15756 15525279 A C); (15757 15527885 C T); (15758 15528135 C T); (15759
15529425 C T); (15760 15530625 T TGA); (15761 15530922 TA T); (15762 15531118 T A); (15763
15531262 G A); (15764 15535146 A C); (15765 15541352 C G); (15766 15543614 T A); (15767 15545479
T G); (15768 15549320 T G); (15769 15549485 C T); (15770 15551385 A G); (15771 15552945 G
A); (15772 15553858 G T); (15773 15553944 G T); (15774 15554007 G A); (15775 15554013 A G); (15776
15554068 G A); (15777 15554112 A T); (15778 15554115 G A); (15779 15554135 C T); (15780 15555455
C T); (15781 15555506 A G); (15782 15555853 A G); (15783 15555925 C T); (15784 15556559 G
A); (15785 15557535 T C); (15786 15558114 G A); (15787 15559283 A C); (15788 15560978 T C); (15789
15562918 G A); (15790 15563835 C A); (15791 15566196 C T); (15792 15567238 C T); (15793 15567280
A G); (15794 15567437 A G); (15795 15568213 A G); (15796 15568672 T C); (15797 15569392 A
AC); (15798 15569461 T C); (15799 15570710 G A); (15800 15570758 C T); (15801 15571188 G A); (15802
15571896 G A); (15803 15572759 C A); (15804 15572824 G A); (15805 15572825 A G); (15806 15574968
A G); (15807 15576131 T C); (15808 15576397 A G); (15809 15577232 C T); (15810 15579469 C
T); (15811 15582081 C T); (15812 15582089 A G); (15813 15582365 C T); (15814 15583312 TAGAG
T); (15815 15583434 G C); (15816 15584886 G A); (15817 15584889 A G); (15818 15586206 C T); (15819
15586799 A G); (15820 15586869 G T); (15821 15587624 A T); (15822 15588259 G T); (15823 15589974
G T); (15824 15590695 T C); (15825 15591182 C T); (15826 15591927 A G); (15827 15592019 T C); (15828
15592281 T C); (15829 15592497 CG C); (15830 15592527 G A); (15831 15592680 G A); (15832
15592769 C T); (15833 15594962 T C); (15834 15595597 A G); (15835 15596202 A G); (15836 15596322
A G); (15837 15596330 T G); (15838 15596375 G A); (15839 15597840 C A); (15840 15598511 G
T); (15841 15598512 A T); (15842 15598637 A G); (15843 15599352 T C); (15844 15599566 G C); (15845
15599615 G T); (15846 15599619 G A); (15847 15600490 T C); (15848 15606672 G A); (15849 15606674
G A); (15850 15606724 G A); (15851 15606866 G A); (15852 15608440 T C); (15853 15608673 A
T); (15854 15609466 A T); (15855 15609515 A G); (15856 15609917 C G); (15857 15610220 G T); (15858
15610709 GTCCT G); (15859 15611315 A G); (15860 15611912 C T); (15861 15614494 C T); (15862
15614720 AT A); (15863 15614792 TTA T); (15864 15615416 C A); (15865 15616222 G T); (15866
15616231 T C); (15867 15618111 C T); (15868 15618284 T C); (15869 15619667 G A); (15870 15620353 C
T); (15871 15620918 T G); (15872 15625445 A C); (15873 15625508 C T); (15874 15625681 G A); (15875
15628286 A G); (15876 15632260 C T); (15877 15632280 T A); (15878 15633161 A G); (15879 15633442
A G); (15880 15633916 G A); (15881 15634429 G A); (15882 15634464 T C); (15883 15634788 G
A); (15884 15634861 T C); (15885 15635699 GAAAAGAAGA G); (15886 15639148 C T); (15887 15640163
G C); (15888 15641075 G T); (15889 15642117 A T); (15890 15642273 G A); (15891 15642612 GT
G); (15892 15644258 T C); (15893 15644293 G A); (15894 15644369 C T); (15895 15645251 C T); (15896
15647391 A G); (15897 15648144 G GA); (15898 15648340 G C); (15899 15649802 A C); (15900
15651020 G A); (15901 15651062 C T); (15902 15651483 C T); (15903 15651809 A G); (15904 15652381
G A); (15905 15652607 T TG); (15906 15653511 C A); (15907 15655441 C T); (15908 15656481 G
T); (15909 15659380 G T); (15910 15659839 C T); (15911 15660562 A C); (15912 15660597 A T); (15913
15660758 TG T); (15914 15660980 G A); (15915 15662691 C T); (15916 15663717 G T); (15917 15664470
G A); (15918 15668425 G C); (15919 15670650 G A); (15920 15671312 G A); (15921 15674569 C
T); (15922 15674687 A G); (15923 15674692 G A); (15924 15678759 C T); (15925 15682156 G A); (15926
15684035 T A); (15927 15684515 T C); (15928 15686437 A T); (15929 15686839 C
CATGAATGGAATATGATTGTTGGTATGTGAA); (15930 15686888 T A); (15931 15689107 T G); (15932
15690657 C T); (15933 15691677 T C); (15934 15692493 G C); (15935 15693036 G A); (15936 15693542
G A); (15937 15694045 G A); (15938 15694521 T C); (15939 15694902 T A); (15940 15696137 C
A); (15941 15698002 C A); (15942 15699324 C T); (15943 15699414 T C); (15944 15699480 C T); (15945
15699625 C G); (15946 15699761 C T); (15947 15699925 C A); (15948 15701458 T C); (15949 15702566
C T); (15950 15702583 A G); (15951 15702932 A G); (15952 15702959 A C); (15953 15703205 A
AT); (15954 15703350 C A); (15955 15705029 T G); (15956 15705305 C T); (15957 15706578 C T); (15958
15706980 C T); (15959 15707068 T C); (15960 15707630 G A); (15961 15708449 C T); (15962 15710601 C
T); (15963 15710729 A G); (15964 15712549 G A); (15965 15712581 A G); (15966 15712797 A G); (15967
15714785 A G); (15968 15717528 G C); (15969 15720169 T C); (15970 15720234 G T); (15971 15722344
T C); (15972 15730756 C T); (15973 15733261 T A); (15974 15733707 T C); (15975 15739415 G A); (15976
15740540 T C); (15977 15740542 T C); (15978 15740865 T C); (15979 15741056 C T); (15980 15741222 C
CAG); (15981 15741965 T C); (15982 15741966 C T); (15983 15741967 A T); (15984 15742948 T
C); (15985 15743338 C T); (15986 15743598 G A); (15987 15744994 G T); (15988 15746905 G A); (15989
15747445 C A); (15990 15752196 C A); (15991 15753443 G A); (15992 15753450 C T); (15993 15753844
C T); (15994 15754538 G T); (15995 15754577 A C); (15996 15757219 C T); (15997 15758037 G
A); (15998 15758492 T C); (15999 15758498 C T); (16000 15758512 C T); (16001 15758538
TATATATATATATAC T); (16002 15759757 G GT); (16003 15760026 C CT); (16004 15760047 C T); (16005
15760054 C T); (16006 15760389 T G); (16007 15760857 GA G); (16008 15762676 C T); (16009 15765370
G A); (16010 15765512 A AT); (16011 15765670 G A); (16012 15765953 G T); (16013 15765999 C
T); (16014 15766241 C T); (16015 15766331 T A); (16016 15767011 C G); (16017 15767028 C T); (16018
15767683 A G); (16019 15767707 G A); (16020 15767882 A G); (16021 15769003 C T); (16022 15769044
T G); (16023 15774289 T A); (16024 15774292 T A); (16025 15774293 A T); (16026 15774325
AATATATAT A); (16027 15774402 TA T); (16028 15776148 A T); (16029 15777107 T G); (16030 15777545
A C); (16031 15780551 G A); (16032 15782609 C T); (16033 15783809 TAGTGTACACATTTG T); (16034
15788792 G C); (16035 15789603 T C); (16036 15789642 TG T); (16037 15791134 T C); (16038 15791910
C CATAT); (16039 15792460 C CACTCGCGCCAACCCGGCGCT); (16040 15794246 T C); (16041 15801487 G
GTGTTGAA); (16042 15807254 T G); (16043 15807315 T TA); (16044 15808019 C T); (16045 15808781 G
A); (16046 15809968 T A); (16047 15810578 C T); (16048 15812556 G T); (16049 15812649 G T); (16050
15816254 G A); (16051 15818802 C T); (16052 15819006 G C); (16053 15819820 A G); (16054 15822952
T C); (16055 15824131 GATT G); (16056 15824732 A G); (16057 15825849 C CA); (16058 15825999 G
T); (16059 15827444 C A); (16060 15827541 G A); (16061 15829028 G A); (16062 15829271 T G); (16063
15829830 G GACA); (16064 15833933 G A); (16065 15836004 C T); (16066 15838568 C CA); (16067
15839834 G T); (16068 15842524 A G); (16069 15842628 G C); (16070 15844418 C CT); (16071
15844862 A G); (16072 15845646 T G); (16073 15846037 C T); (16074 15847534 A G); (16075 15847969
G GTCTATCATAGTGT); (16076 15848067 C T); (16077 15850073 G T); (16078 15850636 C T); (16079
15850902 A C); (16080 15851018 A G); (16081 15852448 T C); (16082 15852858 A C); (16083 15853009
C T); (16084 15853857 A G); (16085 15854454 G A); (16086 15855799 G A); (16087 15856678 T
A); (16088 15857029 T C); (16089 15857287 G A); (16090 15858259 G A); (16091 15858538 T C); (16092
15858622 C T); (16093 15858726 G A); (16094 15864175 A AT); (16095 15865291 T C); (16096 15865662
AT A); (16097 15867923 T C); (16098 15869324 T C); (16099 15869868 C T); (16100 15870476 C
T); (16101 15872076 G T); (16102 15872629 A G); (16103 15874208 G C); (16104 15874282 C A); (16105
15874283 C T); (16106 15874402 G C); (16107 15876328 A G); (16108 15879198 A G); (16109 15880094
G A); (16110 15880295 A G); (16111 15880465 G A); (16112 15881139 T C); (16113 15881463 T
C); (16114 15882600 T G); (16115 15882814 T C); (16116 15883199 A G); (16117 15883240 G A); (16118
15883648 G A); (16119 15885168 T C); (16120 15885276 C A); (16121 15885403 C T); (16122 15885404
T A); (16123 15885405 A G); (16124 15885406 A G); (16125 15885420 GT G); (16126 15886724 A
G); (16127 15887069 C G); (16128 15887182 T G); (16129 15887897 TA T); (16130 15888021 A C); (16131
15889295 T A); (16132 15890744 A G); (16133 15890860 T G); (16134 15890891 A AAT); (16135
15893838 C T); (16136 15894013 C T); (16137 15895115 T C); (16138 15895130 TC T); (16139 15895180
A G); (16140 15895673 G A); (16141 15895709 A G); (16142 15895921 C T); (16143 15896119 CA
C); (16144 15897075 GT G); (16145 15897346 C T); (16146 15897626 G T); (16147 15898417 A T); (16148
15899033 T C); (16149 15902362 G GC); (16150 15902909 A C); (16151 15905659 C T); (16152 15905689
TTG); (16153 15905691 G T); (16154 15907907 A G); (16155 15907989 T A); (16156 15908053 C
T); (16157 15908070 G A); (16158 15908099 C T); (16159 15908108 A C); (16160 15908116 C T); (16161
15908124 T C); (16162 15908130 T C); (16163 15908131 T C); (16164 15908132 T C); (16165 15908685 A
AG); (16166 15909165 G A); (16167 15910764 AATGTAC A); (16168 15911137 G A); (16169 15912061 G
T); (16170 15913382 T C); (16171 15916155 C T); (16172 15916650 C A); (16173 15917275 CT C); (16174
15917586 A AT); (16175 15917833 A G); (16176 15918237 T C); (16177 15918662 T C); (16178 15918746
G A); (16179 15919467 C CT); (16180 15921256 C T); (16181 15921394 TTATA T); (16182 15922683 C
G); (16183 15923669 G GA); (16184 15925387 G A); (16185 15927815 T G); (16186 15930731 C
G); (16187 15930762 C A); (16188 15932133 A T); (16189 15932865 C T); (16190 15934232 C T); (16191
15934298 A T); (16192 15936015 C T); (16193 15938015 T G); (16194 15938543 C A); (16195 15938852
A T); (16196 15939085 T C); (16197 15941894 A T); (16198 15942049 T C); (16199 15943849 C T); (16200
15943861 T C); (16201 15946397 T C); (16202 15946682 CCTT C); (16203 15947164 G A); (16204
15949390 C A); (16205 15950106 A G); (16206 15950630 T C); (16207 15950657 G A); (16208 15951198
A C); (16209 15956081 CA C); (16210 15956969 G A); (16211 15960188 GTGTATGTATGTA G); (16212
15961607 A G); (16213 15961664 G A); (16214 15961783 C G); (16215 15962903 A G); (16216 15962994
A AT); (16217 15964364 T TA); (16218 15964719 T C); (16219 15965050 T C); (16220 15965120 G
A); (16221 15965412 G C); (16222 15966001 T C); (16223 15969850 C T); (16224 15969882 G A); (16225
15970425 T C); (16226 15972604 G A); (16227 15972666 T G); (16228 15973574 C T); (16229 15975626
T C); (16230 15978585 T TTA); (16231 15979662 C T); (16232 15980047 C T); (16233 15982897 T
C); (16234 15983616 G A); (16235 15984721 A C); (16236 15985398 T C); (16237 15989075 G A); (16238
15991359 C T); (16239 15992152 T A); (16240 15992205 G A); (16241 15996588 C T); (16242 15997408
A T); (16243 16000362 A G); (16244 16001029 C T); (16245 16001460 C T); (16246 16001962 A
G); (16247 16002281 G T); (16248 16004597 T C); (16249 16004629 T C); (16250 16005930 G A); (16251
16006088 C T); (16252 16008723 CAACTT C); (16253 16010076 G A); (16254 16011206 C T); (16255
16012157 G A); (16256 16012929 T C); (16257 16012998 G A); (16258 16014660 G A); (16259 16017459
T C); (16260 16017528 G A); (16261 16019106 C T); (16262 16019216 C T); (16263 16019484 C T); (16264
16021425 G A); (16265 16021478 T C); (16266 16025547 G GAAAACAAACAAAAAATAT); (16267
16025607 C T); (16268 16026280 C T); (16269 16029272 C T); (16270 16032457 G T); (16271 16034210
GT G); (16272 16034240 G A); (16273 16034585 C T); (16274 16037605 C A); (16275 16040421 C
T); (16276 16040519 AGTGAT A); (16277 16041985 G A); (16278 16042357 T G); (16279 16043601 T
TTTATTATTATTATTATTATTA); (16280 16046183 T A); (16281 16046357 TC T); (16282 16046359 T
A); (16283 16046380 C T); (16284 16046386 C T); (16285 16046510 C T); (16286 16046637 T C); (16287
16047694 GA G); (16288 16051342 T G); (16289 16051480 CTACAAAAGGCA C); (16290 16051558 A
C); (16291 16052870 C T); (16292 16055005 C T); (16293 16055643 T C); (16294 16058039 C A); (16295
16058907 G A); (16296 16063641 C T); (16297 16063724 G A); (16298 16068524 T C); (16299 16071483
CCGGGGGAGTGGTG C); (16300 16072824 T TTGGCGCTGA); (16301 16073244 T TA); (16302 16073999 G
A); (16303 16074089 G A); (16304 16074397 C T); (16305 16075154 A
ATGGCGCCATCTGGCGCTAC); (16306 16077050 C G); (16307 16079942 T G); (16308 16080036 C
CATAT); (16309 16080725 G T); (16310 16082041 T C); (16311 16083199 T C); (16312 16083576 T
C); (16313 16083792 G GT); (16314 16083866 T A); (16315 16084024 A G); (16316 16084113 A
G); (16317 16089073 A AAGTGAAGGTACTTTATACCAAATT); (16318 16089083 T C); (16319 16089426 T
C); (16320 16089625 CTTA C); (16321 16091363 T A); (16322 16093233 G A); (16323 16093262 A
G); (16324 16093330 C G); (16325 16093391 A G); (16326 16093407 A G); (16327 16093617 G
GA); (16328 16095825 T C); (16329 16097972 T C); (16330 16098007 C T); (16331 16098760 T C); (16332
16101880 C T); (16333 16102767 C G); (16334 16107011 T C); (16335 16107318 C T); (16336 16108223 T
C); (16337 16108524 G A); (16338 16108534 A G); (16339 16112739 CATCCA C); (16340 16112834 C
T); (16341 16113037 G A); (16342 16114442 T C); (16343 16115202 A G); (16344 16115390 G A); (16345
16115526 T C); (16346 16115970 A G); (16347 16118069 G C); (16348 16118094 C A); (16349 16118182
C T); (16350 16119139 C T); (16351 16119413 A G); (16352 16119470 C T); (16353 16119639 G
A); (16354 16120166 C T); (16355 16125327 G T); (16356 16125360 T C); (16357 16126086 A C); (16358
16126159 T C); (16359 16128403 GA G); (16360 16129391 C A); (16361 16131071 A C); (16362
16131271 AT A); (16363 16132899 A T); (16364 16132989 T C); (16365 16133111 A C); (16366 16133265
G T); (16367 16135215 G GCGCTAATAGCGTGGATCCTCA); (16368 16135991 A C); (16369 16136237 C
G); (16370 16137816 G C); (16371 16138238 C T); (16372 16138508 G A); (16373 16140493 C T); (16374
16144021 G A); (16375 16145979 C T); (16376 16146657 A G); (16377 16146661 G A); (16378 16146731
G A); (16379 16146772 GA G); (16380 16146854 G A); (16381 16146874 G T); (16382 16147210 G
C); (16383 16147270 A G); (16384 16148175 A G); (16385 16148497 G A); (16386 16149678 G T); (16387
16149826 G A); (16388 16151091 C T); (16389 16151092 A C); (16390 16151826 C A); (16391 16152492
A C); (16392 16153217 G A); (16393 16155127 G T); (16394 16155385 C T); (16395 16155635 G
GTT); (16396 16155682 C T); (16397 16156885 T C); (16398 16160468 C T); (16399 16160566 G
GAA); (16400 16161124 A AT); (16401 16161441 A G); (16402 16161661 G A); (16403 16162232 A
C); (16404 16163239 G T); (16405 16163889 C T); (16406 16165895 T C); (16407 16167478 T C); (16408
16171249 C T); (16409 16172121 C T); (16410 16174973 A ACTAAACCCTAAACC); (16411 16177568 A
G); (16412 16178347 A C); (16413 16178461 G A); (16414 16178697 T C); (16415 16179046 G A); (16416
16185152 C T); (16417 16186261 G C); (16418 16186315 G A); (16419 16186971 A G); (16420 16187281
A T); (16421 16189559 A C); (16422 16189560 G A); (16423 16189581 G T); (16424 16189582 A
G); (16425 16191352 G A); (16426 16193127 A T); (16427 16193167 C G); (16428 16195463 A G); (16429
16195584 G A); (16430 16198680 T C); (16431 16198797 T C); (16432 16201051 G A); (16433 16201448
T C); (16434 16202917 G A); (16435 16206673 C T); (16436 16208589 G A); (16437 16208897 G
A); (16438 16208947 A G); (16439 16210119 T C); (16440 16210121 A G); (16441 16210273 A G); (16442
16211463 C G); (16443 16211781 C T); (16444 16212508 C T); (16445 16212842 G GA); (16446
16212952 T A); (16447 16212979 T A); (16448 16215418 C T); (16449 16215764 T A); (16450 16217188 A
G); (16451 16217189 T G); (16452 16217190 A T); (16453 16217191 T A); (16454 16217192 A C); (16455
16217193 T G); (16456 16217195 T A); (16457 16217930 G A); (16458 16218875 TATAC T); (16459
16219053 A AT); (16460 16220128 A G); (16461 16221415 C T); (16462 16222217 G A); (16463
16223625 C T); (16464 16225184 A C); (16465 16228746 A G); (16466 16229926 A G); (16467 16230210
GA G); (16468 16230904 A G); (16469 16231151 T C); (16470 16231169 G A); (16471 16231387 A
G); (16472 16234224 T TTA); (16473 16235161 C T); (16474 16235312 G GA); (16475 16235390 CT
C); (16476 16236676 A G); (16477 16236776 T C); (16478 16238251 G A); (16479 16243779 T G); (16480
16243798 T G); (16481 16244293 C T); (16482 16244345 G A); (16483 16244658 GA G); (16484
16245899 A G); (16485 16246249 A G); (16486 16250022 A G); (16487 16250434 A C); (16488 16251322
A G); (16489 16252492 A G); (16490 16252662 A G); (16491 16253918 C T); (16492 16256668 T
C); (16493 16257550 G A); (16494 16258105 A C); (16495 16259054 C A); (16496 16259635 G T); (16497
16260566 G A); (16498 16261521 A G); (16499 16262113 C T); (16500 16262609 A G); (16501 16263280
C T); (16502 16264102 T C); (16503 16265453 C G); (16504 16265558 G A); (16505 16266592 AT
A); (16506 16267854 C T); (16507 16268102 T C); (16508 16269868 T C); (16509 16269911 T A); (16510
16272276 C T); (16511 16272517 A C); (16512 16274125 G A); (16513 16278835 G C); (16514 16278937
A G); (16515 16283843 A ACATAT); (16516 16283886 T G); (16517 16285658 C T); (16518 16285790 C
T); (16519 16285866 A G); (16520 16285957 A G); (16521 16287122 G A); (16522 16287376 T C); (16523
16288989 G A); (16524 16289003 G A); (16525 16289363 G C); (16526 16290811 T TA); (16527
16291429 G A); (16528 16292001 A G); (16529 16292067 C T); (16530 16292880 A G); (16531 16294270
G C); (16532 16295061 G A); (16533 16296337 G A); (16534 16297175 G A); (16535 16299089 A
G); (16536 16299580 T C); (16537 16300120 T G); (16538 16305263 G A); (16539 16307079 A T); (16540
16307080 G T); (16541 16307081 G A); (16542 16307082 T A); (16543 16307105
ACCAAGAGGGGGGGTGAATTGGT A); (16544 16308424 T G); (16545 16308851 G A); (16546 16309314 A
G); (16547 16309327 A C); (16548 16312476 G A); (16549 16313467 C T); (16550 16317846 G A); (16551
16320244 T A); (16552 16320497 AT A); (16553 16322032 C A); (16554 16322375 A G); (16555
16322753 C T); (16556 16324505 T G); (16557 16325777 A G); (16558 16326261 T G); (16559 16326339
C T); (16560 16327097 C T); (16561 16327463 A G); (16562 16328984 T A); (16563 16329073 A
G); (16564 16329495 T C); (16565 16331288 G T); (16566 16331492 G T); (16567 16334399 G A); (16568
16334738 C T); (16569 16334997 A G); (16570 16335319 A ATAATT); (16571 16336241 C T); (16572
16337151 C CT); (16573 16339047 G A); (16574 16339186 C A); (16575 16340060 T G); (16576 16340319
C T); (16577 16340818 T C); (16578 16340833 T TGG); (16579 16341093 C T); (16580 16341096 C
T); (16581 16341231 C T); (16582 16341429 T C); (16583 16342129 G GA); (16584 16346434 A G); (16585
16348127 AT A); (16586 16348600 A AT); (16587 16349599 C A); (16588 16351432 A G); (16589
16352201 G A); (16590 16352309 G C); (16591 16353034 C A); (16592 16355575 A T); (16593 16356287
T G); (16594 16364335 A G); (16595 16364348 G A); (16596 16364631 T C); (16597 16367534 T
C); (16598 16367708 GA G); (16599 16368191 C A); (16600 16368378 G GT); (16601 16369607 C
G); (16602 16370096 C T); (16603 16371386 G A); (16604 16376459 C T); (16605 16376944 A G); (16606
16378235 T C); (16607 16379760 C T); (16608 16381618 G A); (16609 16381814 C G); (16610 16382603
CA C); (16611 16382627 T C); (16612 16384027 G A); (16613 16384243 G A); (16614 16384244 T
G); (16615 16384347 G A); (16616 16384354 T C); (16617 16385240 C A); (16618 16385442 T C); (16619
16385477 G A); (16620 16389509 G A); (16621 16390208 C T); (16622 16391096 A G); (16623 16395488
G A); (16624 16396165 T TCGCGCCACAGTGGCGCCATG); (16625 16399574 G A); (16626 16400726 G
C); (16627 16400844 G A); (16628 16401009 TA T); (16629 16401114 A G); (16630 16401332 A C); (16631
16404515 T TATATAG); (16632 16409749 T G); (16633 16409842 C T); (16634 16409962 T C); (16635
16409978 T A); (16636 16410216 A G); (16637 16410233 A G); (16638 16411063 T C); (16639 16411086
T C); (16640 16411126 C T); (16641 16411138 C T); (16642 16411167 G C); (16643 16412810 G T); (16644
16414626 G A); (16645 16415063 G A); (16646 16417000 C T); (16647 16418372 G T); (16648 16421130
G A); (16649 16422893 C T); (16650 16423037 G C); (16651 16424633 A AC); (16652 16425195 A
G); (16653 16425229 C T); (16654 16425260 A AT); (16655 16427934 C T); (16656 16428052 A G); (16657
16428088 C A); (16658 16428586 A G); (16659 16428719 T C); (16660 16428736 C A); (16661 16429089
A G); (16662 16429098 A T); (16663 16429102 G A); (16664 16433222 A G); (16665 16434939 G
A); (16666 16435066 CAGCATTT C); (16667 16435067 G A); (16668 16436223 T TTTTTCTTC); (16669
16436870 C T); (16670 16437169 G C); (16671 16437604 C A); (16672 16437825 C T); (16673 16439243
G T); (16674 16442993 A G); (16675 16445254 T G); (16676 16445338 T C); (16677 16447231 T
C); (16678 16447446 A C); (16679 16450508 C T); (16680 16451710 C T); (16681 16451868 G A); (16682
16452886 G A); (16683 16453417 G A); (16684 16454050 C T); (16685 16454860 T C); (16686 16455385
C T); (16687 16455404 A C); (16688 16455874 A C); (16689 16456138 A G); (16690 16457522 A
G); (16691 16459059 C T); (16692 16460386 A G); (16693 16460625 G A); (16694 16460681 C T); (16695
16461122 G A); (16696 16461962 G A); (16697 16462027 C T); (16698 16463473 A G); (16699 16463585
G A); (16700 16464140 G A); (16701 16464481 G A); (16702 16465142 G A); (16703 16465555 G
A); (16704 16465704 C T); (16705 16465720 C A); (16706 16466600 G A); (16707 16467575 G A); (16708
16468280 C T); (16709 16468740 C T); (16710 16470254 T C); (16711 16470258 A T); (16712 16471124 G
A); (16713 16471258 A G); (16714 16471378 AT A); (16715 16476745 T C); (16716 16477830 C A); (16717
16478797 AT A); (16718 16479546 G A); (16719 16479807 G A); (16720 16481650 T C); (16721
16482896 G T)

TABLE 2
List of SNPs derived from crossing of Resistant male with susceptible female 1. SNPs listed in format SNP ID,
SNP position relative to reference genome, Favorable allele, Unfavorable allele, each separated by a space.

(1 9280996 A C); (2 9281013 G A); (3 9281195 C T); (4 9281200 A T); (5 9281201 C A); (6 9281223 C T); (7
9281276 A G); (8 9281393 C T); (9 9281485 C T); (10 9281647 G A); (11 9281724 AC A); (12 9281784 A
C); (13 9281826 C T); (14 9281835 G A); (15 9281849 G A); (16 9282235 C T); (17 9283196 G C); (18
9283409 A G); (19 9283754 T C); (20 9283852 T C); (21 9284242 A G); (22 9284284 T A); (23 9284396 C
T); (24 9284444 A G); (25 9284517 A T); (26 9284544 A T); (27 9284917 CT C); (28 9285271 A G); (29
9285329 T C); (30 9285641 C A); (31 9285701 A G); (32 9286741 G C); (33 9287126 G A); (34 9287346 T
G); (35 9287696 T G); (36 9287730 G A); (37 9288083 T A); (38 9288197 C T); (39 9288204 G GA); (40
9288360 T C); (41 9288370 G A); (42 9288405 G A); (43 9288427 T C); (44 9288663 G T); (45 9288686 T
C); (46 9288939 T C); (47 9289409 A G); (48 9289584 T C); (49 9290113 A G); (50 9290269 A G); (51
9290321 A T); (52 9290460 C T); (53 9290465 C T); (54 9290483 T C); (55 9290553 T C); (56 9290730 T
G); (57 9290769 A G); (58 9291038 G A); (59 9291072 T A); (60 9291087 C T); (61 9291179 TG T); (62
9291229 G T); (63 9291251 G A); (64 9291357 A T); (65 9291583 C G); (66 9291658 G A); (67 9291766 A
AT); (68 9291902 T C); (69 9291967 C T); (70 9292058 A AAT); (71 9292150 T C); (72 9292231
ATATGCTGAAAGTTTTT A); (73 9292418 C T); (74 9292437 C G); (75 9292503 C T); (76 9292772 G A); (77
9292792 G A); (78 9292832 C A); (79 9292848 G A); (80 9292864 A G); (81 9292865 G T); (82 9292866 C
T); (83 9293079 G A); (84 9293132 C T); (85 9293138 G A); (86 9293190 T G); (87 9293329 T C); (88
9293351 T A); (89 9293521 C T); (90 9293588 C T); (91 9293603 A C); (92 9293674 T C); (93 9293699 G
A); (94 9293925 C T); (95 9294113 G C); (96 9294157 C A); (97 9294234 A G); (98 9294289 T C); (99
9294332 T A); (100 9294612 G T); (101 9294776 C T); (102 9294805 G T); (103 9294966 GTA G); (104
9295411 G A); (105 9295472 C T); (106 9295596 T G); (107 9295618 A C); (108 9295751 T C); (109
9295841 G GA); (110 9295937 A T); (111 9296384 T C); (112 9296404 T A); (113 9296475 C A); (114
9296487 T C); (115 9296637 A AT); (116 9296728 T A); (117 9296787 T C); (118 9296822 T A); (119
9296823 A T); (120 9297052 C A); (121 9297264 C G); (122 9297354 A G); (123 9297425 C T); (124
9297796 T C); (125 9297798 T C); (126 9297884 C T); (127 9297889 C T); (128 9297939 T C); (129
9298007 T G); (130 9298047 G A); (131 9298211 T A); (132 9298262 C CG); (133 9298394 T C); (134
9298603 G GT); (135 9298626 C A); (136 9298708 A G); (137 9298754 G A); (138 9298845 C T); (139
9298846 T C); (140 9298946 A T); (141 9299120 G T); (142 9299177 C T); (143 9299209 T G); (144
9299247 G A); (145 9299327 C T); (146 9299776 C A); (147 9300207 A G); (148 9300267 G T); (149
9300355 A G); (150 9300405 G T); (151 9301308 A AT); (152 9301458 A G); (153 9301541 CT C); (154
9301543 A G); (155 9301674 G A); (156 9301769 G A); (157 9302189 G A); (158 9302192 A G); (159
9302333 T TG); (160 9302588 A G); (161 9302849 T C); (162 9302877 G C); (163 9302948 A G); (164
9302955 G C); (165 9303130 C G); (166 9303367 T C); (167 9303439 A G); (168 9303535 C T); (169
9303598 C T); (170 9304281 G A); (171 9304590 A G); (172 9304844 C T); (173 9304928 A G); (174
9304937 A G); (175 9304965 C G); (176 9305374 C T); (177 9305697 G A); (178 9305841 C T); (179
9305944 C T); (180 9305950 C G); (181 9306100 A C); (182 9306484 A G); (183 9307000 C T); (184
9307076 A G); (185 9307127 T C); (186 9307261 G A); (187 9307291 A C); (188 9307379 C A); (189
9307667 G A); (190 9307730 T C); (191 9308097 G C); (192 9308169 G A); (193 9308353 C T); (194
9308594 T C); (195 9308952 T C); (196 9309199 A G); (197 9309420 T C); (198 9309498 C T); (199
9309860 T G); (200 9309950 AT A); (201 9310002 T C); (202 9310042 T C); (203 9310099 T C); (204
9310151 T C); (205 9310299 A T); (206 9311612 T A); (207 9311642 C T); (208 9311656 G A); (209
9311677 C T); (210 9311734 T C); (211 9311754 G A); (212 9311759 G A); (213 9311762 TG T); (214
9311835 C T); (215 9311873 G T); (216 9312082 G A); (217 9312273 G A); (218 9312427 T C); (219
9312529 G A); (220 9312575 T C); (221 9312591 G A); (222 9312701 T A); (223 9312834 C G); (224
9312872 G A); (225 9312944 C A); (226 9313018 T C); (227 9313095 G A); (228 9313213 C A); (229
9313398 C T); (230 9314094 C T); (231 9314218 C A); (232 9314770 A G); (233 9314884 T C); (234
9314924 G T); (235 9315263 A G); (236 9315836 T C); (237 9315999 T G); (238 9316000 A G); (239
9316145 A G); (240 9316189 A G); (241 9316195 C T); (242 9316203 A G); (243 9316326 A G); (244
9316493 C T); (245 9316703 A G); (246 9316769 G A); (247 9317531 C A); (248 9317571 G A); (249
9317606 G T); (250 9317801 G T); (251 9317954 T C); (252 9318210 G A); (253 9318370 T C); (254
9318500 A G); (255 9318582 G A); (256 9318584 G A); (257 9318599 T
TTCTAGAAATGTGATGATAATTGGA); (258 9318682 T A); (259 9319112 C G); (260 9319821 A G); (261
9319878 T A); (262 9320091 G T); (263 9320107 TTATA T); (264 9320144 T G); (265 9320368 A AT); (266
9320434 T C); (267 9320488 G A); (268 9320514 C T); (269 9320550 T A); (270 9320790 GA G); (271
9321074 T C); (272 9321284 T C); (273 9321369 G T); (274 9321439 G A); (275 9321706 A T); (276
9321900 G A); (277 9322060 GT G); (278 9322073 C A); (279 9322310 A C); (280 9322361 A C); (281
9322434 T C); (282 9322505 T C); (283 9322662 A G); (284 9322667 C T); (285 9322860 G T); (286
9322981 A G); (287 9323008 T C); (288 9323921 G A); (289 9324043 A G); (290 9324285 T C); (291
9324748 A C); (292 9324814 T C); (293 9325202 C T); (294 9325253 A G); (295 9325415 A C); (296
9325636 T C); (297 9326516 G A); (298 9326533 C T); (299 9326743 G T); (300 9326764 A G); (301
9326857 T A); (302 9327012 A G); (303 9328391 T C); (304 9328946 T C); (305 9329079 C CT); (306
9329095 C T); (307 9329477 T G); (308 9329522 C T); (309 9329916 T C); (310 9330583 T C); (311
9330685 A G); (312 9331019 T C); (313 9331289 C T); (314 9331960 G A); (315 9332360 T C); (316
9332383 A G); (317 9332469 A C); (318 9333204 G A); (319 9333391 A AT); (320 9333539 C G); (321
9333657 G A); (322 9334350 T C); (323 9334538 A ATT); (324 9334549 A AT); (325 9334784 T C); (326
9334873 G A); (327 9334946 A G); (328 9335025 C T); (329 9335192 C G); (330 9335202 A G); (331
9335588 TA T); (332 9335684 T G); (333 9335750 C A); (334 9335859 A G); (335 9336658 A G); (336
9336772 A G); (337 9336799 AC A); (338 9336881 C T); (339 9336930 T C); (340 9337090 T A); (341
9337643 A G); (342 9337827 C A); (343 9337957 T A); (344 9338549 C T); (345 9338802 A G); (346
9339150 C T); (347 9339593 C T); (348 9339699 C T); (349 9339768 G A); (350 9339829 T C); (351
9339971 G T); (352 9340302 G A); (353 9340326 T C); (354 9340921 A G); (355 9341245 G A); (356
9341294 G A); (357 9341328 G A); (358 9341482 T C); (359 9341768 G A); (360 9341981 C T); (361
9342009 C T); (362 9342188 C T); (363 9342315 G A); (364 9342331 G T); (365 9342460 G
GAAGGGA); (366 9342704 G GAAGT); (367 9342863 C G); (368 9342865 G A); (369 9342979 C T); (370
9343228 G T); (371 9343447 C T); (372 9343585 G A); (373 9343615 T C); (374 9343690 C CA); (375
9343735 A G); (376 9344153 C T); (377 9344373 G A); (378 9344431 T C); (379 9344444 A G); (380
9344866 C T); (381 9344979 G A); (382 9345231 A G); (383 9345406 C T); (384 9345511 A G); (385
9345659 G A); (386 9345691 G A); (387 9345772 C G); (388 9345959 C T); (389 9346602 C T); (390
9346657 G A); (391 9346848 A G); (392 9346895 A G); (393 9346932 G A); (394 9346956 A T); (395
9347477 C A); (396 9347479 A G); (397 9347538 T C); (398 9347742 C A); (399 9348068 A G); (400
9348125 A G); (401 9348128 G T); (402 9348348 T A); (403 9348652 A G); (404 9348762 C T); (405
9348891 C T); (406 9348949 C T); (407 9349015 A G); (408 9349036 G C); (409 9349106 G A); (410
9349497 T C); (411 9349558 G T); (412 9349625 T C); (413 9349661 T G); (414 9349953 G A); (415
9350269 A G); (416 9350351 C T); (417 9350464 C T); (418 9350510 C T); (419 9350533 G A); (420
9350573 T C); (421 9350648 C T); (422 9350653 T C); (423 9350802 A G); (424 9350827 C T); (425
9350938 T G); (426 9350952 G A); (427 9351006 A G); (428 9351047 C T); (429 9351212 C T); (430
9351265 C T); (431 9351282 T A); (432 9351396 A G); (433 9351628 C T); (434 9351657 T C); (435
9352012 C T); (436 9352417 A G); (437 9352426 G A); (438 9352496 C T); (439 9352590 A G); (440
9352648 C T); (441 9353102 T C); (442 9353385 G A); (443 9353642 C T); (444 9353739 T C); (445
9355287 A G); (446 9355377 C T); (447 9355470 A G); (448 9355580 T C); (449 9355723 C G); (450
9355886 T C); (451 9356166 C T); (452 9356258 C T); (453 9356410 G T); (454 9356506 C T); (455
9356880 C G); (456 9357107 T A); (457 9357432 G T); (458 9357664 T C); (459 9357775 T C); (460
9358155 G A); (461 9358238 C T); (462 9358254 G A); (463 9358298 A C); (464 9358306 G A); (465
9358395 T A); (466 9358518 C T); (467 9358636 C T); (468 9358712 C A); (469 9358713 G A); (470
9358729 A G); (471 9358746 T C); (472 9359091 T G); (473 9359423 A G); (474 9359564 C A); (475
9359590 G A); (476 9360107 T C); (477 9360188 A C); (478 9360295 C T); (479 9360391 C G); (480
9360596 C T); (481 9360747 C CT); (482 9360963 T A); (483 9361075 C T); (484 9361086 G A); (485
9361165 G A); (486 9361743 A C); (487 9362056 G A); (488 9362193 T C); (489 9362542 A G); (490
9362836 T C); (491 9363196 G A); (492 9363541 T G); (493 9363770 T C); (494 9363799 A G); (495
9363826 A G); (496 9363954 A G); (497 9364160 G A); (498 9364338 A G); (499 9364393 G T); (500
9364530 G A); (501 9364690 C T); (502 9364714 A T); (503 9364728 TGA T); (504 9364946 AT A); (505
9365048 C G); (506 9365069 T C); (507 9365105 A G); (508 9365170 C T); (509 9365282 C T); (510
9365422 T C); (511 9365761 A C); (512 9366289 G C); (513 9366787 G T); (514 9366839 T G); (515
9367003 G A); (516 9367058 A T); (517 9367667 A T); (518 9367714 A T); (519 9369144 G T); (520
9369165 C A); (521 9369460 A C); (522 9369605 G A); (523 9369903 T A); (524 9370187 G C); (525
9370749 G A); (526 9370846 T A); (527 9370861 G A); (528 9371177 G A); (529 9371196 A G); (530
9371325 ATGAG A); (531 9371417 G T); (532 9371716 A G); (533 9371982 C A); (534 9372737 T G); (535
9373077 T C); (536 9373180 C T); (537 9373436 C T); (538 9373843 G A); (539 9374000 G A); (540
9374011 C T); (541 9374275 G A); (542 9374490 T C); (543 9374546 C T); (544 9374876 G A); (545
9374965 C T); (546 9375058 G A); (547 9375114 C T); (548 9375188 A G); (549 9375650 C T); (550
9376035 G A); (551 9376099 G A); (552 9376111 T C); (553 9376116 A G); (554 9376317 G A); (555
9376326 G A); (556 9376391 A G); (557 9376550 T C); (558 9376728 C T); (559 9377202 A G); (560
9378067 T C); (561 9378123 A T); (562 9378490 A C); (563 9378539 G A); (564 9378653 G A); (565
9378687 A G); (566 9378758 C T); (567 9378819 T C); (568 9378851 T C); (569 9378939 T C); (570
9379081 C T); (571 9379184 G A); (572 9379317 G A); (573 9379399 G A); (574 9379407 T C); (575
9379438 A G); (576 9379445 A G); (577 9379474 G T); (578 9379975 A G); (579 9380272 G A); (580
9380686 T C); (581 9380880 A G); (582 9381320 T C); (583 9381609 A C); (584 9381727 C T); (585
9381867 C T); (586 9381873 C T); (587 9381933 G A); (588 9382008 C T); (589 9382644 T C); (590
9382645 G A); (591 9382891 G T); (592 9382962 T C); (593 9383009 T C); (594 9383038 G A); (595
9383658 T G); (596 9383684 G A); (597 9383718 A T); (598 9383897 A T); (599 9383967 T G); (600
9384157 C T); (601 9384207 C T); (602 9384432 C T); (603 9385042 G A); (604 9385174 A G); (605
9385394 A G); (606 9385471 A G); (607 9385567 C T); (608 9385680 A G); (609 9386021 T C); (610
9386252 A T); (611 9386314 C A); (612 9386338 G T); (613 9386356 C T); (614 9386382 G A); (615
9386385 G C); (616 9386412 A G); (617 9386578 G A); (618 9386599 C T); (619 9387042 T C); (620
9387067 C T); (621 9388241 C T); (622 9389115 G A); (623 9389510 G T); (624 9389584 G C); (625
9389646 C G); (626 9390011 C T); (627 9390035 T C); (628 9390233 T C); (629 9390454 G T); (630
9390522 T C); (631 9390578 G A); (632 9390643 T C); (633 9390826 C T); (634 9390965 A T); (635
9391244 T C); (636 9391287 C A); (637 9391414 A G); (638 9391671 G A); (639 9392428 A G); (640
9392577 A G); (641 9392774 T C); (642 9393285 G A); (643 9393297 A C); (644 9393426 C A); (645
9393551 T C); (646 9393559 G A); (647 9393628 G C); (648 9394563 A T); (649 9394624 A G); (650
9394954 A T); (651 9395187 C G); (652 9395688 G C); (653 9395755 T TA); (654 9396073 C T); (655
9396508 G T); (656 9397311 T A); (657 9397514 A G); (658 9398486 GA G); (659 9399145 G GA); (660
9399295 G A); (661 9399316 G A); (662 9399522 A G); (663 9399851 G T); (664 9400266 C A); (665
9400291 T A); (666 9400974 G A); (667 9401122 A T); (668 9401154 A G); (669 9401170 T
TTAATTAAAAAAACA); (670 9401282 T C); (671 9401457 C T); (672 9401508 C T); (673 9401600 A G); (674
9402229 C A); (675 9402238 G C); (676 9402255 C T); (677 9402833 T C); (678 9402872 G T); (679
9402948 T C); (680 9402998 G A); (681 9403120 T C); (682 9403147 G C); (683 9403580 G GTA); (684
9403622 A T); (685 9403658 G A); (686 9403684 T A); (687 9403729 G A); (688 9403741 C T); (689
9403825 G A); (690 9404163 G A); (691 9404375 T G); (692 9404395 G T); (693 9404448 G A); (694
9404661 A G); (695 9404713 G A); (696 9404743 C T); (697 9404759 G A); (698 9405051 T C); (699
9405081 C T); (700 9405407 G A); (701 9405413 C T); (702 9405419 A G); (703 9405421 A G); (704
9405581 A G); (705 9405685 T C); (706 9405764 G A); (707 9405780 GA G); (708 9405814 C T); (709
9405831 G A); (710 9405913 G C); (711 9406063 T C); (712 9406308 G A); (713 9406313 T C); (714
9406349 G A); (715 9406407 A G); (716 9406410 G A); (717 9406627 G A); (718 9406851 A G); (719
9406884 A G); (720 9406950 C T); (721 9406970 C T); (722 9407001 G A); (723 9407152 C T); (724
9407396 C T); (725 9407674 T G); (726 9407799 C G); (727 9407884 C T); (728 9407906 C T); (729
9407938 G A); (730 9408020 T A); (731 9408200 A G); (732 9408202 C T); (733 9408430 C T); (734
9408462 G C); (735 9408753 A G); (736 9409280 C T); (737 9409378 G T); (738 9409400 A C); (739
9409403 C T); (740 9409411 T G); (741 9409708 T C); (742 9409766 T C); (743 9409991 G A); (744
9410020 T TA); (745 9410119 G A); (746 9410144 T C); (747 9410162 T A); (748 9410374 A G); (749
9410477 C T); (750 9410503 C G); (751 9410620 C T); (752 9410744 G A); (753 9410766 G A); (754
9410871 A G); (755 9410922 T C); (756 9411050 A G); (757 9411131 G A); (758 9411147 T C); (759
9411168 C A); (760 9411310 G A); (761 9411366 T C); (762 9412124 C CTA); (763 9412169 T A); (764
9412530 C T); (765 9412678 T A); (766 9413038 T C); (767 9413065 A G); (768 9413123 G GT); (769
9413217 C T); (770 9413301 C A); (771 9413641 T C); (772 9413717 T C); (773 9413721 G A); (774
9413803 T C); (775 9414232 A G); (776 9414401 T C); (777 9414405 C T); (778 9414635 A G); (779
9414718 T C); (780 9414770 C T); (781 9414772 T C); (782 9414843 G A); (783 9414999 A G); (784
9415349 T C); (785 9415377 T C); (786 9415586 AAC A); (787 9415957 A G); (788 9416306 C G); (789
9416427 G A); (790 9416569 T C); (791 9416646 C T); (792 9416652 T C); (793 9416825 C T); (794
9416831 C A); (795 9416899 G C); (796 9416938 C T); (797 9417010 T C); (798 9417012 A G); (799
9417122 A G); (800 9417354 C T); (801 9417425 A G); (802 9417432 G A); (803 9417634 T C); (804
9417861 A C); (805 9418114 C T); (806 9418437 T C); (807 9418652 T C); (808 9419393 C T); (809
9419617 C T); (810 9419754 A G); (811 9419973 C T); (812 9420410 T G); (813 9420628 C T); (814
9420661 CA C); (815 9420729 A G); (816 9420977 T A); (817 9421184 A G); (818 9421479 T C); (819
9421616 T C); (820 9421848 A G); (821 9421874 G A); (822 9421885 A C); (823 9421914 C T); (824
9421988 C T); (825 9422055 C A); (826 9422117 G A); (827 9422178 T C); (828 9422281 G A); (829
9422315 C T); (830 9422905 T C); (831 9422971 A G); (832 9423460 G A); (833 9423546 T C); (834
9423550 G A); (835 9423581 C G); (836 9423680 T G); (837 9424297 C G); (838 9424406 G A); (839
9424450 G A); (840 9424653 G A); (841 9424696 T G); (842 9424747 C T); (843 9424926 A T); (844
9425106 A G); (845 9425320 C T); (846 9425363 T C); (847 9425521 A G); (848 9425554 T C); (849
9425628 T C); (850 9425670 T C); (851 9425681 G A); (852 9425717 C T); (853 9425992 A G); (854
9426759 T C); (855 9427769 C T); (856 9427795 A G); (857 9427891 C T); (858 9427918 G A); (859
9427922 G A); (860 9427964 A G); (861 9428165 C A); (862 9428353 A C); (863 9428431 A G); (864
9428435 G A); (865 9428486 G T); (866 9428550 T C); (867 9428895 G A); (868 9428899 A G); (869
9429022 G A); (870 9429038 A G); (871 9429057 T C); (872 9429347 T A); (873 9429404 T G); (874
9429421 A G); (875 9429428 A G); (876 9429449 G A); (877 9429524 G A); (878 9429532 T C); (879
9429684 A G); (880 9429801 A AT); (881 9429883 T G); (882 9430012 G A); (883 9430118 C T); (884
9430119 A G); (885 9430271 G C); (886 9430325 T C); (887 9430468 C T); (888 9430514 C T); (889
9430589 C T); (890 9430776 C CT); (891 9430982 C G); (892 9431302 C T); (893 9431576 T C); (894
9432407 TA T); (895 9432437 C G); (896 9432583 C G); (897 9432691 G A); (898 9432824 A AT); (899
9433535 C T); (900 9433664 G C); (901 9433809 T G); (902 9434341 A T); (903 9434558 T C); (904
9434653 C T); (905 9435162 C A); (906 9435398 A C); (907 9435450 T C); (908 9435461 T C); (909
9435753 A C); (910 9435767 T C); (911 9435821 C A); (912 9436059 T C); (913 9436160 A G); (914
9436307 T C); (915 9436558 T C); (916 9436704 T C); (917 9436802 C A); (918 9436930 C T); (919
9437053 C T); (920 9437153 G A); (921 9437246 G T); (922 9437284 T C); (923 9437421 C T); (924
9437441 G A); (925 9437442 C T); (926 9437510 G A); (927 9437525 A G); (928 9437557 C T); (929
9437697 A G); (930 9437852 C A); (931 9437870 C G); (932 9438007 TTA T); (933 9438099 TAGTTA
T); (934 9438352 T C); (935 9438524 T C); (936 9438544 T C); (937 9439324 C G); (938 9439365 C T); (939
9439462 A G); (940 9439484 C G); (941 9440833 C G); (942 9440984 T C); (943 9440986 A G); (944
9441004 T C); (945 9441028 G C); (946 9441529 C CTT); (947 9441763 C T); (948 9441939 A T); (949
9442039 C T); (950 9442502 C T); (951 9442508 C T); (952 9442860 A T); (953 9442951 A G); (954
9443455 C A); (955 9443658 C T); (956 9444001 A G); (957 9444274 T C); (958 9445091 T G); (959
9445345 T C); (960 9445355 T C); (961 9445487 G A); (962 9445549 A G); (963 9446029 C A); (964
9446263 A C); (965 9446475 A T); (966 9446853 C T); (967 9446962 A G); (968 9447166 G C); (969
9447489 C T); (970 9447490 G T); (971 9447698 T C); (972 9447780 G A); (973 9448177 G A); (974
9448860 A T); (975 9449685 G T); (976 9449708 T G); (977 9449816 A T); (978 9450229 C T); (979
9450491 A T); (980 9451200 A G); (981 9451514 C T); (982 9451778 A C); (983 9452256 T TA); (984
9452438 C T); (985 9452656 A AT); (986 9452719 T A); (987 9452807 T C); (988 9453097 A C); (989
9453247 C A); (990 9453275 G A); (991 9453294 T TA); (992 9453483 A G); (993 9453515 G A); (994
9453625 T C); (995 9453709 A G); (996 9453717 A G); (997 9453978 T C); (998 9453995 G A); (999
9454102 T C); (1000 9454213 T C); (1001 9454229 C T); (1002 9454260 GA G); (1003 9454295 G A); (1004
9454312 T C); (1005 9454326 GAATA G); (1006 9454404 G A); (1007 9454480 C T); (1008 9454593 C
T); (1009 9454725 C T); (1010 9454843 C T); (1011 9454881 T G); (1012 9454900 A ACT); (1013 9454957
A G); (1014 9454969 C T); (1015 9455067 T C); (1016 9455224 A AT); (1017 9455396 G T); (1018 9455408
C T); (1019 9455433 A C); (1020 9455631 G A); (1021 9455681 C T); (1022 9455688 A G); (1023 9455691
G A); (1024 9455768 A C); (1025 9455888 C T); (1026 9456022 A T); (1027 9456039 G A); (1028 9456118
A T); (1029 9456217 G A); (1030 9456355 T G); (1031 9456440 T C); (1032 9456494 C A); (1033 9456649
T G); (1034 9456784 C T); (1035 9456984 G A); (1036 9456999 A T); (1037 9457153 G A); (1038 9457204
G T); (1039 9457300 G A); (1040 9457437 C T); (1041 9457500 G A); (1042 9457544 C A); (1043 9457670
A C); (1044 9457694 A C); (1045 9457768 A T); (1046 9457852 G A); (1047 9457930 T G); (1048 9457941
T C); (1049 9458010 C T); (1050 9458026 T C); (1051 9458076 C T); (1052 9458100 C CT); (1053 9458177
G GGT); (1054 9458216 T C); (1055 9458217 A G); (1056 9458322 C T); (1057 9458440 G A); (1058
9458750 A G); (1059 9458792 G A); (1060 9458826 T C); (1061 9458827 C T); (1062 9458864 G A); (1063
9458868 C T); (1064 9458872 T C); (1065 9458895 C T); (1066 9458897 T C); (1067 9458908 C T); (1068
9458926 T G); (1069 9458953 T A); (1070 9459175 T C); (1071 9459191 C T); (1072 9460328 C G); (1073
9460416 A T); (1074 9460654 A G); (1075 9460785 A G); (1076 9460840 G
GCTGGGAATACTTTTTTT); (1077 9461200 A T); (1078 9461359 G A); (1079 9461476 C T); (1080 9461662
T A); (1081 9462635 T G); (1082 9462938 T C); (1083 9463111 T C); (1084 9463724 G A); (1085 9463725 T
A); (1086 9463789 T TGCA); (1087 9463798 G T); (1088 9463840 A C); (1089 9464187 CA C); (1090
9464908 C T); (1091 9465067 G GT); (1092 9465073 A G); (1093 9465130 G GA); (1094 9465475 G
C); (1095 9465923 C T); (1096 9466002 A G); (1097 9466025 C T); (1098 9466156 A C); (1099 9466214 A
G); (1100 9466677 G T); (1101 9466738 G C); (1102 9467246 G A); (1103 9467267 A T); (1104 9467469
TA T); (1105 9467791 A C); (1106 9468047 T A); (1107 9468288 G A); (1108 9468290 G A); (1109 9468292
G A); (1110 9468294 G A); (1111 9468296 G A); (1112 9468298 G A); (1113 9468300 A G); (1114 9468326
A G); (1115 9468332 A G); (1116 9468472 C T); (1117 9468538 G A); (1118 9468690 A G); (1119 9468751
C G); (1120 9468766 A G); (1121 9468776 C T); (1122 9469027 T A); (1123 9469599 C A); (1124 9469788
C A); (1125 9470182 G A); (1126 9470516 T C); (1127 9470605 T G); (1128 9470702 C T); (1129 9470724
A G); (1130 9470740 T C); (1131 9470754 A G); (1132 9470763 C T); (1133 9470794 G C); (1134 9471060
T C); (1135 9471073 G C); (1136 9471199 C G); (1137 9471261 A G); (1138 9471377 C G); (1139 9471460
T G); (1140 9471556 G T); (1141 9471911 C G); (1142 9471990 C G); (1143 9472128 A C); (1144 9472589
A C); (1145 9473201 T G); (1146 9473264 G C); (1147 9473307 C T); (1148 9473336 A G); (1149 9473370
A G); (1150 9473409 T C); (1151 9473432 T A); (1152 9473450 G A); (1153 9473600 A G); (1154 9473667
A G); (1155 9473775 C CAT); (1156 9473847 T C); (1157 9474043 C T); (1158 9474105 A T); (1159
9474264 A C); (1160 9474440 G A); (1161 9474536 C A); (1162 9474578 A G); (1163 9474878 G C); (1164
9474985 T C); (1165 9475083 A G); (1166 9475116 C T); (1167 9475674 G T); (1168 9475798 A AT); (1169
9475885 A G); (1170 9476065 G A); (1171 9476151 G A); (1172 9476444 G A); (1173 9476522 C T); (1174
9476639 T C); (1175 9476886 G A); (1176 9476893 T C); (1177 9476963 C T); (1178 9477136 A G); (1179
9477262 G A); (1180 9477462 G A); (1181 9477775 A C); (1182 9477821 C T); (1183 9477936 C T); (1184
9478024 T G); (1185 9478191 C T); (1186 9478379 G A); (1187 9478393 A G); (1188 9478465 G T); (1189
9478480 G A); (1190 9478599 A G); (1191 9478776 T C); (1192 9479265 C T); (1193 9479598 A G); (1194
9479765 G A); (1195 9480013 C A); (1196 9480020 T C); (1197 9480027 C T); (1198 9480171 C T); (1199
9480229 G A); (1200 9480394 G A); (1201 9480647 A G); (1202 9480998 C G); (1203 9481189 C T); (1204
9481238 A C); (1205 9481265 G A); (1206 9481433 G A); (1207 9481669 C T); (1208 9481717 C T); (1209
9481748 A G); (1210 9481789 C G); (1211 9481809 C T); (1212 9482008 G A); (1213 9482104 T C); (1214
9482170 T C); (1215 9482174 C T); (1216 9482276 T C); (1217 9482425 C T); (1218 9482465 G A); (1219
9482792 C T); (1220 9482816 C T); (1221 9482817 T C); (1222 9482830 A G); (1223 9483010 A G); (1224
9483063 T C); (1225 9483106 C T); (1226 9483109 C G); (1227 9483127 T C); (1228 9483206 T C); (1229
9483237 A G); (1230 9483298 G A); (1231 9483431 T C); (1232 9483497 C T); (1233 9483574 T C); (1234
9483758 C T); (1235 9483831 C T); (1236 9483837 C T); (1237 9483915 C T); (1238 9484026 T G); (1239
9484307 A C); (1240 9484360 C T); (1241 9484376 T C); (1242 9484496 G A); (1243 9484498 C T); (1244
9484568 C A); (1245 9484610 G T); (1246 9484738 G A); (1247 9484752 G A); (1248 9484768 T G); (1249
9484904 C T); (1250 9484936 A G); (1251 9484954 C T); (1252 9484991 T C); (1253 9485086 C T); (1254
9485422 CTT C); (1255 9485469 G A); (1256 9485523 C A); (1257 9485539 A G); (1258 9485579 T
C); (1259 9485689 C T); (1260 9485853 T A); (1261 9486124 G A); (1262 9486180 A G); (1263 9486391 A
G); (1264 9486394 A G); (1265 9486513 C T); (1266 9486515 C T); (1267 9486586 A T); (1268 9486593 T
A); (1269 9486648 C CAT); (1270 9486700 T C); (1271 9486735 T TGGATAACTAGAA); (1272 9486785 T
C); (1273 9487198 T C); (1274 9487413 C T); (1275 9487474 A T); (1276 9487566 T A); (1277 9487629 G
A); (1278 9487673 T C); (1279 9487683 A G); (1280 9487759 G A); (1281 9487884 G A); (1282 9488114 T
A); (1283 9488203 C T); (1284 9488210 C G); (1285 9488232 C T); (1286 9488248 G A); (1287 9488283 G
A); (1288 9488452 G A); (1289 9488495 T C); (1290 9488587 T C); (1291 9488616 G A); (1292 9488678 C
T); (1293 9488873 C G); (1294 9488893 A G); (1295 9489041 A G); (1296 9489077 A T); (1297 9489084 G
A); (1298 9489144 C G); (1299 9489155 C T); (1300 9489174 C T); (1301 9489275 A G); (1302 9489387 G
C); (1303 9489515 A G); (1304 9489535 A G); (1305 9489759 A G); (1306 9490131 G
GCGATCAGCGCGGGAACGGCA); (1307 9490154 G A); (1308 9490179 C T); (1309 9490220 A G); (1310
9490687 T C); (1311 9491064 C T); (1312 9491264 T C); (1313 9491304 C T); (1314 9491446 C T); (1315
9491495 T C); (1316 9491887 G A); (1317 9492012 A G); (1318 9492034 C T); (1319 9492089 A C); (1320
9492103 G A); (1321 9492316 T C); (1322 9492403 G A); (1323 9492559 A G); (1324 9492560 G A); (1325
9492610 G A); (1326 9492727 A G); (1327 9492949 GT G); (1328 9492962 G A); (1329 9493014 A
T); (1330 9493447 C T); (1331 9493477 G C); (1332 9493660 T C); (1333 9493899 G C); (1334 9493953 C
T); (1335 9493970 T C); (1336 9496792 A G); (1337 9497459 C T); (1338 9497670 T C); (1339 9497771 C
T); (1340 9497892 T A); (1341 9497920 G A); (1342 9497952 T C); (1343 9498036 C T); (1344 9498193 A
G); (1345 9498199 G A); (1346 9498291 C T); (1347 9498377 A C); (1348 9498551 A T); (1349 9498613 C
A); (1350 9498665 A C); (1351 9498693 A AAAATTC); (1352 9498699 T G); (1353 9498700 T A); (1354
9498762 G A); (1355 9498766 G A); (1356 9498769 C T); (1357 9498779 T C); (1358 9498854 A T); (1359
9498878 T C); (1360 9498927 A G); (1361 9499155 C T); (1362 9499438 G C); (1363 9499780 A AG); (1364
9500102 C A); (1365 9500312 T C); (1366 9500481 T C); (1367 9500849 A G); (1368 9500877 C G); (1369
9501404 A T); (1370 9501828 C T); (1371 9502018 T C); (1372 9502027 A G); (1373 9502088 T C); (1374
9502407 T TA); (1375 9502837 A C); (1376 9502845 A G); (1377 9503198 A T); (1378 9503199 A G); (1379
9503453 T C); (1380 9503766 A G); (1381 9503776 A G); (1382 9503842 T C); (1383 9503850 T C); (1384
9503917 A G); (1385 9504014 G A); (1386 9504037 G A); (1387 9504099 A G); (1388 9504104 G T); (1389
9504182 T C); (1390 9504194 C T); (1391 9504221 T C); (1392 9504299 C T); (1393 9504304 A G); (1394
9504316 T TG); (1395 9504375 A T); (1396 9504424 C T); (1397 9504436 A G); (1398 9504444 C T); (1399
9504498 A G); (1400 9504499 C T); (1401 9504524 ACTT A); (1402 9504586 A G); (1403 9504695 T
C); (1404 9504807 C A); (1405 9505048 A G); (1406 9505115 G GAA); (1407 9505179 T C); (1408 9505206
T C); (1409 9505209 T C); (1410 9505296 A G); (1411 9505366 C T); (1412 9505413 A G); (1413 9505560
C T); (1414 9505705 T C); (1415 9505789 C T); (1416 9505820 A T); (1417 9505897 A G); (1418 9506143 C
T); (1419 9506153 C T); (1420 9506539 C T); (1421 9506757 A T); (1422 9506789 A G); (1423 9506878 T
C); (1424 9506947 T C); (1425 9506983 G A); (1426 9507102 A G); (1427 9507135 C T); (1428 9507228 C
A); (1429 9507684 C T); (1430 9507985 A G); (1431 9507996 A C); (1432 9508018 C G); (1433 9508045 C
T); (1434 9508063 G T); (1435 9508214 T C); (1436 9508355 A G); (1437 9508413 G A); (1438 9508647 G
A); (1439 9508675 C A); (1440 9508676 C A); (1441 9508703 T C); (1442 9508748 T C); (1443 9508761 A
G); (1444 9508814 G A); (1445 9508950 A AT); (1446 9508956 G A); (1447 9508990 G A); (1448 9509040
C G); (1449 9509041 T C); (1450 9509251 G A); (1451 9509257 G C); (1452 9509573 A T); (1453 9509656
G C); (1454 9509694 T C); (1455 9509891 G A); (1456 9509974 A G); (1457 9510072 T C); (1458 9510170
A C); (1459 9510228 T C); (1460 9510259 T C); (1461 9510322 G A); (1462 9510359 C T); (1463 9510410 A
T); (1464 9510451 A G); (1465 9510460 C T); (1466 9510521 T G); (1467 9510681 G A); (1468 9510878 A
G); (1469 9511307 A G); (1470 9511388 C T); (1471 9511450 G A); (1472 9511499 C T); (1473 9511544 C
A); (1474 9511699 G A); (1475 9511710 A G); (1476 9511735 T C); (1477 9511757 T C); (1478 9511819 G
GCGGTA); (1479 9511862 A C); (1480 9511931 G T); (1481 9511935 C T); (1482 9512066 A G); (1483
9512088 T C); (1484 9512155 A G); (1485 9512190 T C); (1486 9512201 C T); (1487 9512346 G A); (1488
9512394 C T); (1489 9512959 T A); (1490 9513054 A G); (1491 9513288 TAAG T); (1492 9514011 T
C); (1493 9514033 C CT); (1494 9514398 A G); (1495 9514458 CTT C); (1496 9514698 A AT); (1497
9514729 T G); (1498 9515754 T C); (1499 9515838 C T); (1500 9515964 G C); (1501 9516118 A C); (1502
9516287 A G); (1503 9516691 G T); (1504 9517218 G C); (1505 9518352 T C); (1506 9518782 A C); (1507
9518814 G T); (1508 9518901 G A); (1509 9518911 G A); (1510 9519142 C T); (1511 9519974 T G); (1512
9520459 C CTCATG); (1513 9520537 C T); (1514 9520548 C T); (1515 9520622 G A); (1516 9520716 T
C); (1517 9520831 C T); (1518 9520998 G A); (1519 9523230 A C); (1520 9525277 T A); (1521 9525623 C
T); (1522 9526027 C G); (1523 9526860 T C); (1524 9526915 A G); (1525 9526978 T C); (1526 9526996 A
G); (1527 9526998 G T); (1528 9527386 A C); (1529 9527707 T C); (1530 9527945 T C); (1531 9528505 G
A); (1532 9528549 C T); (1533 9528569 C T); (1534 9528977 T C); (1535 9529022 C T); (1536 9529190 G
A); (1537 9529288 C T); (1538 9531362 G A); (1539 9531521 C G); (1540 9531589 A G); (1541 9532520 C
CATAT); (1542 9533329 A T); (1543 9533441 C A); (1544 9533767 T A); (1545 9533797 T TTA); (1546
9534097 A T); (1547 9534241 C G); (1548 9534463 TG T); (1549 9535274 G GA); (1550 9535309 G
A); (1551 9535436 C G); (1552 9535582 C A); (1553 9535652 C T); (1554 9535660 G A); (1555 9535719 C
T); (1556 9536221 C T); (1557 9536360 C T); (1558 9536367 A G); (1559 9536511 C T); (1560 9536597 TA
T); (1561 9536648 A T); (1562 9536863 G A); (1563 9537084 A G); (1564 9537281 A T); (1565 9537334 T
C); (1566 9537345 G A); (1567 9537442 T G); (1568 9538176 A T); (1569 9538292 C T); (1570 9538639 G
A); (1571 9538645 C T); (1572 9538715 C T); (1573 9538718 G A); (1574 9538744 G A); (1575 9538774 C
A); (1576 9538923 A G); (1577 9538950 T C); (1578 9538968 G A); (1579 9538980 C CTGTTAT); (1580
9538991 C T); (1581 9538992 C T); (1582 9539051 C T); (1583 9539063 G A); (1584 9539074 C T); (1585
9539097 T A); (1586 9539114 C G); (1587 9539115 T C); (1588 9539817 G A); (1589 9544888
TCTTCTCCGGCGC T); (1590 9544891 T C); (1591 9544895 T C); (1592 9544929 C T); (1593 9544970 C
G); (1594 9545002 G A); (1595 9545005 C T); (1596 9545897 T G); (1597 9546595 AT A); (1598 9547411
G T); (1599 9547823 A G); (1600 9548626 TA T); (1601 9548753 T A); (1602 9548754 T A); (1603 9549747
C CT); (1604 9550135 T A); (1605 9550136 T G); (1606 9550137 A T); (1607 9550138 T A); (1608 9550139
T A); (1609 9550140 C T); (1610 9550141 A T); (1611 9550142 A T); (1612 9550143 T C); (1613 9550144 A
T); (1614 9550145 A T); (1615 9550146 G T); (1616 9550148 A T); (1617 9550149 A T); (1618 9550150 T
C); (1619 9550151 T A); (1620 9550152 G A); (1621 9550153 A C); (1622 9550154 T A); (1623 9550155 T
A); (1624 9550156 A G); (1625 9550298 G GT); (1626 9551455 G C); (1627 9551798 C T); (1628 9552614 T
A); (1629 9554823 T A); (1630 9555417 C T); (1631 9556253 G A); (1632 9556385 A T); (1633 9556386 C
A); (1634 9556387 A T); (1635 9558434 G A); (1636 9558518 C T); (1637 9559744 G T); (1638 9559773 G
T); (1639 9559782 C T); (1640 9560469 C T); (1641 9560874 C T); (1642 9562241 G T); (1643 9562375 G
A); (1644 9562572 AG A); (1645 9562870 G A); (1646 9562939 G T); (1647 9563011 C T); (1648 9563060
C A); (1649 9563143 G A); (1650 9564449 G A); (1651 9565117 G A); (1652 9565607 G A); (1653 9565743
C T); (1654 9566178 G T); (1655 9566472 G A); (1656 9566473 G A); (1657 9566992 C T); (1658 9569283
C T); (1659 9569317 C A); (1660 9570557 A T); (1661 9570604 A G); (1662 9571083 C T); (1663 9571204 C
T); (1664 9571225 G C); (1665 9571233 G C); (1666 9571315 C T); (1667 9571373 T C); (1668 9571391 A
G); (1669 9572717 T G); (1670 9572749 C T); (1671 9572886 G T); (1672 9572908 TTTCTTCCTAC T); (1673
9573307 T C); (1674 9573312 C T); (1675 9573504 C T); (1676 9575943 A T); (1677 9576136 G A); (1678
9576153 A G); (1679 9576183 A T); (1680 9576192 C T); (1681 9576279 C T); (1682 9576355 A T); (1683
9576437 A T); (1684 9576442 T C); (1685 9576479 C T); (1686 9576758 G A); (1687 9576894 C T); (1688
9577147 G A); (1689 9577219 A T); (1690 9577610 G A); (1691 9578749 C T); (1692 9578841 G A); (1693
9578892 C T); (1694 9578908 T G); (1695 9578966 G A); (1696 9580507 G A); (1697 9583392 T A); (1698
9584039 TAA T); (1699 9584080 T A); (1700 9584596 G A); (1701 9584994 G T); (1702 9585677 T
TTA); (1703 9585956 C T); (1704 9586568 G A); (1705 9586979 G A); (1706 9587180 A T); (1707 9587369
G A); (1708 9587448 G A); (1709 9587594 G A); (1710 9587872 G A); (1711 9587881 C T); (1712 9588310
T G); (1713 9588543 T C); (1714 9588861 A C); (1715 9589152 G GA); (1716 9590402 A C); (1717 9594279
C G); (1718 9595300 A G); (1719 9595455 G A); (1720 9596138 T C); (1721 9596514 G A); (1722 9596676
G A); (1723 9597148 T G); (1724 9605988 G C); (1725 9607748 C T); (1726 9607813 A C); (1727 9608272
T A); (1728 9608382 A C); (1729 9608414 T C); (1730 9608525 C T); (1731 9608997 C G); (1732 9609015 C
T); (1733 9609276 C A); (1734 9609318 C G); (1735 9609572 C T); (1736 9610804 G A); (1737 9611360 C
A); (1738 9611414 G T); (1739 9611483 G A); (1740 9612311 C T); (1741 9612505 G A); (1742 9612530 C
A); (1743 9612635 C T); (1744 9612678 G A); (1745 9612707 G A); (1746 9613211 C A); (1747 9613303 C
C T); (1748 9613905 G A); (1749 9614094 A AT); (1750 9614815 A C); (1751 9615257 T C); (1752 9615292
A T); (1753 9616858 A AT); (1754 9617712 C A); (1755 9617836 G A); (1756 9618036 T A); (1757 9618346
T C); (1758 9618625 A C); (1759 9618803 A T); (1760 9619001 A C); (1761 9620803 A C); (1762 9621209
G A); (1763 9621811 G GA); (1764 9621982 A G); (1765 9622088 A G); (1766 9622760 T G); (1767
9622986 G T); (1768 9623977 G A); (1769 9623997 C T); (1770 9624189 C T); (1771 9624824 G GA); (1772
9625058 C T); (1773 9625308 G A); (1774 9626222 T C); (1775 9626537 C A); (1776 9626627 G A); (1777
9626660 G A); (1778 9626876 A G); (1779 9627111 A G); (1780 9627250 A G); (1781 9627296 A G); (1782
9627665 C T); (1783 9627697 A G); (1784 9627976 G A); (1785 9628295 C G); (1786 9628491 C T); (1787
9628493 C T); (1788 9628498 G A); (1789 9628640 A C); (1790 9628732 T C); (1791 9628810 T C); (1792
9628819 C T); (1793 9628865 A G); (1794 9628909 C CT); (1795 9628934 A G); (1796 9628959 A C); (1797
9629010 C T); (1798 9629269 G A); (1799 9629376 G A); (1800 9629413 T C); (1801 9629459 C A); (1802
9629575 G A); (1803 9629700 C T); (1804 9629704 C A); (1805 9629739 C T); (1806 9629748 C T); (1807
9629775 A G); (1808 9629875 A G); (1809 9630202 T C); (1810 9630279 A G); (1811 9630353 A G); (1812
9630783 C T); (1813 9630882 T G); (1814 9630907 T C); (1815 9631000 C T); (1816 9631068 G A); (1817
9631078 A G); (1818 9631091 C T); (1819 9631305 A G); (1820 9631397 A G); (1821 9631496 G A); (1822
9631786 C T); (1823 9631808 C T); (1824 9631836 G A); (1825 9631952 A G); (1826 9632140 T C); (1827
9632186 G A); (1828 9632720 A G); (1829 9632866 C T); (1830 9632882 C T); (1831 9632976 T C); (1832
9633027 G T); (1833 9633345 T C); (1834 9633400 T C); (1835 9633409 C T); (1836 9633413 G A); (1837
9634720 T C); (1838 9634806 G C); (1839 9634825 A G); (1840 9634983 C T); (1841 9635321 G A); (1842
9635376 A G); (1843 9635427 A G); (1844 9635577 T C); (1845 9635632 T C); (1846 9635658 G C); (1847
9635819 A G); (1848 9635966 C T); (1849 9636210 T C); (1850 9636314 A G); (1851 9636357 G A); (1852
9636428 A G); (1853 9636457 T C); (1854 9636547 C T); (1855 9636566 C T); (1856 9636976 A G); (1857
9637145 T C); (1858 9637171 A C); (1859 9637522 T C); (1860 9637591 A G); (1861 9637628 G A); (1862
9637674 C T); (1863 9638002 C T); (1864 9638018 C T); (1865 9638086 G A); (1866 9638092 A C); (1867
9638169 C T); (1868 9638171 G C); (1869 9638242 T C); (1870 9638462 C T); (1871 9638526 C T); (1872
9638637 C T); (1873 9638710 G A); (1874 9638774 T C); (1875 9639378 C T); (1876 9639525 T G); (1877
9640041 G T); (1878 9640834 G A); (1879 9641144 A G); (1880 9641357 T TTTA); (1881 9642630 G
T); (1882 9643058 G A); (1883 9643942 A G); (1884 9643945 G A); (1885 9643993 A G); (1886 9644031 C
T); (1887 9644046 C T); (1888 9644651 T C); (1889 9644725 A T); (1890 9645020 A G); (1891 9645278 T
TA); (1892 9645337 T C); (1893 9645440 G A); (1894 9645471 C T); (1895 9645632 C T); (1896 9645731 G
A); (1897 9646011 C A); (1898 9646102 G C); (1899 9646346 A G); (1900 9646612 G C); (1901 9647217 T
C); (1902 9647412 G A); (1903 9647617 T A); (1904 9647943 A G); (1905 9648336 T A); (1906 9648754 G
A); (1907 9649050 T A); (1908 9649234 T C); (1909 9649501 G A); (1910 9649570 T C); (1911 9649641 C
T); (1912 9649750 T G); (1913 9649928 A C); (1914 9650449 A T); (1915 9650492 A G); (1916 9651128 T
C); (1917 9651139 C T); (1918 9651202 G C); (1919 9651530 C G); (1920 9651658 A C); (1921 9651804 C
T); (1922 9651899 T C); (1923 9652008 T C); (1924 9652156 G A); (1925 9652280 A G); (1926 9652465 A
G); (1927 9652575 T C); (1928 9652805 A G); (1929 9652865 A C); (1930 9652915 G A); (1931 9652951 A
G); (1932 9652957 C T); (1933 9653130 T C); (1934 9653152 G A); (1935 9654318 C T); (1936 9654524 A
G); (1937 9654552 G A); (1938 9654570 A G); (1939 9654576 C A); (1940 9654687 G A); (1941 9655793 C
T); (1942 9655912 G A); (1943 9655943 C T); (1944 9656007 G A); (1945 9656219 T G); (1946 9656338 A
G); (1947 9656363 A C); (1948 9656511 C T); (1949 9656730 G A); (1950 9656771 CTG C); (1951 9656796
C T); (1952 9656808 A G); (1953 9656826 T C); (1954 9656948 G A); (1955 9657055 T C); (1956 9657227
A C); (1957 9657451 G A); (1958 9657461 T C); (1959 9657916 A G); (1960 9658346 C T); (1961 9658690
T C); (1962 9658695 G A); (1963 9658723 C T); (1964 9658776 A G); (1965 9658952 A G); (1966 9659543
A C); (1967 9660024 G A); (1968 9661058 G A); (1969 9661093 C CACTTCCCTCCTTTAAA); (1970 9661176
C A); (1971 9661205 A C); (1972 9661419 G A); (1973 9661567 T G); (1974 9661592 G A); (1975 9661638
G C); (1976 9662044 GA G); (1977 9662363 T A); (1978 9662528 C A); (1979 9662716 AT A); (1980
9663388 G A); (1981 9663392 T C); (1982 9663603 G A); (1983 9663689 A G); (1984 9663725 C T); (1985
9663791 C T); (1986 9663805 A T); (1987 9663827 G A); (1988 9663997 A C); (1989 9664272 A G); (1990
9664274 T C); (1991 9664369 G A); (1992 9664479 T C); (1993 9664624 G A); (1994 9664753 G A); (1995
9664928 A G); (1996 9664942 A G); (1997 9664993 T C); (1998 9665042 G A); (1999 9665066 A G); (2000
9665067 T A); (2001 9665068 A G); (2002 9665149 C T); (2003 9665175 T C); (2004 9665325 A C); (2005
9665371 A G); (2006 9665451 G T); (2007 9665464 G A); (2008 9665521 C T); (2009 9665534 C T); (2010
9665564 A G); (2011 9665721 G A); (2012 9665737 A G); (2013 9665773 T G); (2014 9665779 G A); (2015
9665790 C T); (2016 9665870 C T); (2017 9665879 A G); (2018 9665971 A T); (2019 9666010 C A); (2020
9666014 T G); (2021 9666017 G A); (2022 9666175 A G); (2023 9666189 T C); (2024 9666253 A G); (2025
9666261 A C); (2026 9666462 G A); (2027 9666570 C A); (2028 9666676 A G); (2029 9666685 G T); (2030
9666687 A G); (2031 9666718 A G); (2032 9666894 A G); (2033 9667039 G A); (2034 9667041 G T); (2035
9668015 C G); (2036 9668224 G T); (2037 9668259 A G); (2038 9668290 G A); (2039 9668292 G A); (2040
9668478 T C); (2041 9668498 G T); (2042 9668613 G GA); (2043 9668782 T C); (2044 9668833 G A); (2045
9668958 C A); (2046 9668961 A G); (2047 9669128 G A); (2048 9669150 T C); (2049 9669413 C T); (2050
9669454 T C); (2051 9669494 C T); (2052 9669512 C G); (2053 9669532 T C); (2054 9669740 T A); (2055
9669814 T C); (2056 9669815 G T); (2057 9670067 G A); (2058 9670082 G A); (2059 9670088 C T); (2060
9670135 A G); (2061 9670153 G A); (2062 9670162 G A); (2063 9670232 A G); (2064 9670240 C T); (2065
9670257 G A); (2066 9670259 T C); (2067 9670393 C G); (2068 9670413 A G); (2069 9670817 C T); (2070
9670846 G A); (2071 9670888 A C); (2072 9670982 G T); (2073 9671044 C T); (2074 9671110 T C); (2075
9671206 T C); (2076 9671318 A T); (2077 9671360 G A); (2078 9671477 G A); (2079 9671511 G A); (2080
9671593 G C); (2081 9671835 A G); (2082 9671841 GA G); (2083 9671901 G A); (2084 9671924 A
C); (2085 9671958 T A); (2086 9672128 C G); (2087 9672161 G A); (2088 9672420 A G); (2089 9672519 T
C); (2090 9672527 C T); (2091 9672845 T C); (2092 9672856 G A); (2093 9673057 C T); (2094 9673093 C
T); (2095 9673187 A C); (2096 9673275 A G); (2097 9673574 G A); (2098 9673771 A G); (2099 9673877 A
G); (2100 9673983 C G); (2101 9674282 T C); (2102 9674290 T C); (2103 9674371 A G); (2104 9674663 T
C); (2105 9674676 T C); (2106 9674688 T C); (2107 9674710 A C); (2108 9675415 G T); (2109 9675490 G
A); (2110 9675744 A G); (2111 9675967 T C); (2112 9676012 C G); (2113 9676043 A T); (2114 9676084 G
C); (2115 9676091 T C); (2116 9676152 A T); (2117 9676257 T G); (2118 9676459 T TTC); (2119 9676598 T
A); (2120 9676857 T G); (2121 9677150 C T); (2122 9677171 T C); (2123 9677213 T C); (2124 9677288 T
C); (2125 9677402 A G); (2126 9677609 C A); (2127 9677862 C T); (2128 9678021 C T); (2129 9678283 T
C); (2130 9678536 T A); (2131 9678799 A T); (2132 9679098 G A); (2133 9679182 G A); (2134 9679223 A
G); (2135 9679273 G T); (2136 9679291 A C); (2137 9679389 G A); (2138 9679955 G A); (2139 9680000
CT C); (2140 9680224 A C); (2141 9680244 G A); (2142 9680837 A G); (2143 9680868 G T); (2144 9680869
G T); (2145 9680894 C T); (2146 9681251 C T); (2147 9681361 C T); (2148 9681678 C A); (2149 9681715 A
C); (2150 9681963 A C); (2151 9682235 G A); (2152 9682407 A G); (2153 9682433 T C); (2154 9682467 A
G); (2155 9682552 C T); (2156 9682821 T G); (2157 9682841 T A); (2158 9682870 T C); (2159 9682904 G
A); (2160 9682932 T C); (2161 9683157 A G); (2162 9683185 T C); (2163 9683447 A G); (2164 9683514 T
C); (2165 9683531 G A); (2166 9683588 A G); (2167 9683759 C A); (2168 9683867 T C); (2169 9683899 A
G); (2170 9684151 G A); (2171 9684248 C A); (2172 9684251 G T); (2173 9684440 C G); (2174 9684475 C
A); (2175 9684663 A C); (2176 9684934 G A); (2177 9685182 A C); (2178 9685417 T C); (2179 9685531 C
T); (2180 9685577 G A); (2181 9685890 A C); (2182 9685933 T C); (2183 9686034 C G); (2184 9686219 G
A); (2185 9686220 A G); (2186 9686342 G A); (2187 9686343 A G); (2188 9686712 C T); (2189 9686860 T
G); (2190 9686964 T C); (2191 9687026 T C); (2192 9687457 G A); (2193 9687937 C G); (2194 9687946 G
A); (2195 9687958 C T); (2196 9688071 C A); (2197 9688241 T C); (2198 9688244 T C); (2199 9688267 G
C); (2200 9688420 A G); (2201 9688958 A G); (2202 9689032 A G); (2203 9689086 G A); (2204 9689208 T
C); (2205 9689304 A T); (2206 9689472 G A); (2207 9689504 G C); (2208 9689663 C T); (2209 9689702 T
C); (2210 9689804 G A); (2211 9689931 G A); (2212 9690056 C T); (2213 9690193 G A); (2214 9690264 T
TA); (2215 9690265 G A); (2216 9690562 A C); (2217 9690586 A G); (2218 9690591 T C); (2219 9690794 C
T); (2220 9690934 T C); (2221 9690979 G A); (2222 9690987 G A); (2223 9690989 T C); (2224 9691103 G
A); (2225 9691394 A G); (2226 9691837 A G); (2227 9691882 T C); (2228 9691914 A G); (2229 9692003 G
A); (2230 9692035 A T); (2231 9692143 A G); (2232 9692416 C CG); (2233 9692442 T G); (2234 9692454
A G); (2235 9692739 G A); (2236 9692790 G A); (2237 9692810 G A); (2238 9693056 T C); (2239 9693337
G A); (2240 9693518 C T); (2241 9693545 G A); (2242 9693587 T G); (2243 9693598 T C); (2244 9694127
G C); (2245 9694166 C T); (2246 9694258 G A); (2247 9694515 G GTTATAATTATTTA); (2248 9694526 G
T); (2249 9694528 T C); (2250 9694682 G T); (2251 9694749 G A); (2252 9694969 C T); (2253 9695114 G
T); (2254 9695117 G A); (2255 9695162 G A); (2256 9695420 A T); (2257 9695444 G A); (2258 9695481 C
A); (2259 9695820 A G); (2260 9696130 G A); (2261 9696193 C A); (2262 9696239 T C); (2263 9696287 A
T); (2264 9696535 GCATAAATCAATGGTTTTTCAGTCAAA G); (2265 9696735 A G); (2266 9697249 A
C); (2267 9697500 C T); (2268 9697766 T A); (2269 9697975 C T); (2270 9697980 G C); (2271 9698012 G
A); (2272 9698030 C G); (2273 9698177 CA C); (2274 9698937 A C); (2275 9699128 G T); (2276 9699181
G A); (2277 9699463 C T); (2278 9699503 G A); (2279 9699538 G A); (2280 9699848 C T); (2281 9699891
G C); (2282 9700062 A T); (2283 9700209 G A); (2284 9700450 C T); (2285 9700464 T A); (2286 9700925
T C); (2287 9700979 T G); (2288 9701043 T A); (2289 9701406 G C); (2290 9701453 G C); (2291 9701797
T C); (2292 9702063 A G); (2293 9702105 A G); (2294 9702840 C T); (2295 9702865 A G); (2296 9703110
G GT); (2297 9703225 A G); (2298 9703424 C G); (2299 9703480 A AAATCAG); (2300 9703502 T A); (2301
9703556 G A); (2302 9703591 G C); (2303 9703622 A G); (2304 9703629 G T); (2305 9703634 G T); (2306
9704124 A T); (2307 9704202 T C); (2308 9704281 T C); (2309 9704342 T C); (2310 9704510 A G); (2311
9704619 G A); (2312 9704654 A G); (2313 9704760 T C); (2314 9704777 G C); (2315 9704780 C A); (2316
9704781 T A); (2317 9704782 A G); (2318 9705674 C T); (2319 9705733 A G); (2320 9706026 G
GATTGCATAATAGAACTTTAAAAAACATAAA); (2321 9706142 G T); (2322 9706178 T C); (2323 9706205 C
T); (2324 9706210 C G); (2325 9706540 T A); (2326 9706879 A G); (2327 9706939 T C); (2328 9707093 A
G); (2329 9707196 A G); (2330 9707214 C T); (2331 9707307 A G); (2332 9707537 A C); (2333 9707618 A
T); (2334 9707688 T C); (2335 9707789 A G); (2336 9707865 C T); (2337 9708027 G A); (2338 9709607 C
A); (2339 9710169 T C); (2340 9710294 T C); (2341 9710717 C A); (2342 9710725 T C); (2343 9710728 T
C); (2344 9710737 G A); (2345 9710766 C T); (2346 9710868 AG A); (2347 9710906 C A); (2348 9710914
G A); (2349 9710923 T C); (2350 9711037 A G); (2351 9711157 C A); (2352 9711428 A G); (2353 9711455
A G); (2354 9711957 A T); (2355 9711964 C T); (2356 9711982 A G); (2357 9712039 A G); (2358 9712070
C T); (2359 9713457 G A); (2360 9713772 A G); (2361 9713832 A G); (2362 9714117 T
TTCACAACATGAAAATC); (2363 9714225 A G); (2364 9714263 C T); (2365 9714278 A G); (2366 9714385 A
G); (2367 9714759 T C); (2368 9714817 AG A); (2369 9714886 G A); (2370 9714941 T C); (2371 9715318
G T); (2372 9715495 C T); (2373 9715504 G A); (2374 9715887 T G); (2375 9716140 T C); (2376 9716185
G T); (2377 9716302 G A); (2378 9716507 A G); (2379 9716629 A T); (2380 9716648 A C); (2381 9716804
A T); (2382 9716911 C A); (2383 9717220 G A); (2384 9717531 A G); (2385 9717985 A G); (2386 9718115
C T); (2387 9718341 C G); (2388 9718429 G C); (2389 9718749 G T); (2390 9718793 A AC); (2391 9719396
A G); (2392 9719434 A T); (2393 9719704 G A); (2394 9719823 A G); (2395 9719971 A G); (2396 9720350
C G); (2397 9720394 C A); (2398 9720399 G A); (2399 9720857 GA G); (2400 9720897 T C); (2401
9721013 C T); (2402 9721044 G A); (2403 9721102 A G); (2404 9721291 C T); (2405 9721330 C T); (2406
9721412 T C); (2407 9721548 C T); (2408 9721878 G A); (2409 9721941 A T); (2410 9722022 T A); (2411
9722116 G A); (2412 9722172 T C); (2413 9722212 A G); (2414 9722421 T C); (2415 9722612 C T); (2416
9722637 C T); (2417 9722829 T C); (2418 9722922 T C); (2419 9723286 T C); (2420 9723297 T C); (2421
9723595 A G); (2422 9723599 G A); (2423 9723620 T G); (2424 9723986 C T); (2425 9724085 C T); (2426
9724086 G C); (2427 9724142 AT A); (2428 9724371 T A); (2429 9724373 A T); (2430 9725330 G C); (2431
9725366 A G); (2432 9725799 G A); (2433 9725827 G A); (2434 9725893 T C); (2435 9726581 G A); (2436
9726723 G C); (2437 9726765 C T); (2438 9726799 T C); (2439 9726969 TA T); (2440 9727046 C T); (2441
9727103 A G); (2442 9727111 G A); (2443 9727119 G A); (2444 9727225 C T); (2445 9727232 A T); (2446
9727237 C CT); (2447 9727284 A G); (2448 9727324 G A); (2449 9727356 T C); (2450 9727401 G A); (2451
9727500 C T); (2452 9727644 T G); (2453 9727919 C T); (2454 9727991 C T); (2455 9728047 T G); (2456
9728253 A G); (2457 9728303 A G); (2458 9728333 G C); (2459 9728406 T C); (2460 9728445 A G); (2461
9728600 G A); (2462 9729120 T G); (2463 9729191 G C); (2464 9729397 A AT); (2465 9729465 A T); (2466
9729846 A C); (2467 9729911 G A); (2468 9730519 C T); (2469 9730558 T TA); (2470 9730584 G A); (2471
9730600 C T); (2472 9730622 G A); (2473 9730831 T C); (2474 9730916 C T); (2475 9731075 G A); (2476
9731123 A T); (2477 9731277 A C); (2478 9731291 A G); (2479 9731420 G A); (2480 9731471 TA T); (2481
9731888 AT A); (2482 9732299 C A); (2483 9732353 A G); (2484 9732354 C T); (2485 9732370 A G); (2486
9732441 C T); (2487 9732469 C A); (2488 9732662 A G); (2489 9732693 T C); (2490 9732758 A G); (2491
9732837 G A); (2492 9733040 C T); (2493 9733068 CA C); (2494 9733118 G A); (2495 9733786 T C); (2496
9733942 T C); (2497 9734246 AT A); (2498 9734317 G A); (2499 9734675 C T); (2500 9734740 C A); (2501
9734878 A T); (2502 9735040 A G); (2503 9735161 A T); (2504 9735371 A T); (2505 9735613 C CT); (2506
9735640 A C); (2507 9735666 A T); (2508 9735679 T C); (2509 9735747 A T); (2510 9735998 C T); (2511
9736327 T C); (2512 9736448 C A); (2513 9736512 C T); (2514 9736554 T C); (2515 9736605 C CA); (2516
9737293 T C); (2517 9737319 A C); (2518 9737469 T C); (2519 9737497 A G); (2520 9737507 T C); (2521
9737570 T A); (2522 9737692 A G); (2523 9737931 C T); (2524 9737938 C T); (2525 9737978 G A); (2526
9738041 G A); (2527 9738139 T A); (2528 9738347 T C); (2529 9738631 G A); (2530 9738646 A C); (2531
9738748 G A); (2532 9738931 A C); (2533 9739346 T G); (2534 9739563 T C); (2535 9739706 A G); (2536
9739709 C T); (2537 9739734 T A); (2538 9739805 A G); (2539 9739807 T G); (2540 9739942 T C); (2541
9739968 A G); (2542 9740019 G A); (2543 9740235 A G); (2544 9740340 G A); (2545 9740857 G C); (2546
9740919 C T); (2547 9740937 C T); (2548 9740980 G A); (2549 9741082 T G); (2550 9741194 A G); (2551
9741726 C T); (2552 9743316 G A); (2553 9744960 T C); (2554 9744987 A C); (2555 9745001 A G); (2556
9745022 A T); (2557 9745260 C A); (2558 9745396 G A); (2559 9745495 A G); (2560 9745589 G T); (2561
9745767 A G); (2562 9745852 C T); (2563 9745869 T C); (2564 9745926 C A); (2565 9745985 C T); (2566
9746281 T C); (2567 9746790 G A); (2568 9746825 G A); (2569 9746955 G A); (2570 9747149 C T); (2571
9747218 C CT); (2572 9747818 A C); (2573 9748048 A C); (2574 9748308 T C); (2575 9748591 T C); (2576
9748650 C T); (2577 9748769 T C); (2578 9748859 T C); (2579 9748905 C A); (2580 9749089 T C); (2581
9749178 G T); (2582 9749195 G A); (2583 9749229 C G); (2584 9749332 T C); (2585 9749460 T C); (2586
9749693 G T); (2587 9750209 C T); (2588 9766317 T C); (2589 9766662 T C); (2590 9766788 G A); (2591
9766859 C A); (2592 9767038 T C); (2593 9767100 G A); (2594 9767124 T C); (2595 9767285 A G); (2596
9767519 A G); (2597 9767753 C T); (2598 9767799 G A); (2599 9768102 T C); (2600 9768203 T G); (2601
9768426 A C); (2602 9768471 T C); (2603 9768828 G A); (2604 9768931 G A); (2605 9769267 G T); (2606
9769435 G A); (2607 9769727 T C); (2608 9769878 A AGTGGCTTGGGCATGGTTT); (2609 9770022 G
A); (2610 9770090 GA G); (2611 9770247 T C); (2612 9770430 G A); (2613 9770538 A C); (2614 9770562
A C); (2615 9770962 C G); (2616 9771115 T C); (2617 9771131 T G); (2618 9771236 T C); (2619 9771239 T
C); (2620 9771318 G C); (2621 9771887 T C); (2622 9771947 T A); (2623 9772063 G A); (2624 9772096 C
A); (2625 9772171 G A); (2626 9772237 T C); (2627 9772281 G A); (2628 9772282 A G); (2629 9772364 T
C); (2630 9772547 G A); (2631 9772560 T C); (2632 9772766 T C); (2633 9772786 A G); (2634 9772792 C
T); (2635 9772793 A G); (2636 9772794 C T); (2637 9772824 C T); (2638 9772842 T C); (2639 9772884 A
G); (2640 9772910 C T); (2641 9772958 C A); (2642 9772985 A G); (2643 9773000 A G); (2644 9773084 T
C); (2645 9773342 A G); (2646 9773977 A G); (2647 9774056 A G); (2648 9774096 A T); (2649 9774193 C
T); (2650 9774217 A G); (2651 9774458 C T); (2652 9774461 A G); (2653 9774650 C T); (2654 9774744 G
A); (2655 9774755 G T); (2656 9774757 C T); (2657 9774771 C T); (2658 9774982 A C); (2659 9775019 G
A); (2660 9775140 A G); (2661 9775145 A G); (2662 9775199 C T); (2663 9775339 G C); (2664 9775343 T
C); (2665 9775528 T C); (2666 9775586 G A); (2667 9775654 A T); (2668 9775747 T C); (2669 9775854 G
A); (2670 9775877 T C); (2671 9776066 G A); (2672 9776193 C T); (2673 9776270 T A); (2674 9776467 A
C); (2675 9776533 A G); (2676 9776549 C T); (2677 9776606 T C); (2678 9776608 G A); (2679 9776649 C
T); (2680 9776750 A C); (2681 9776864 C T); (2682 9777148 C T); (2683 9777157 G A); (2684 9777176 C
T); (2685 9777254 G A); (2686 9777313 G A); (2687 9777354 C CA); (2688 9777474 C A); (2689 9777503 T
C); (2690 9777684 T G); (2691 9777725 C T); (2692 9777767 C T); (2693 9777781 G C); (2694 9777900 T
A); (2695 9777901 A G); (2696 9778137 T C); (2697 9778198 A G); (2698 9778219 C T); (2699 9778514 C
T); (2700 9778585 A G); (2701 9778641 G A); (2702 9778708 T C); (2703 9778824 A G); (2704 9778965 C
T); (2705 9779007 G A); (2706 9779149 G A); (2707 9779365 C T); (2708 9779460 C A); (2709 9779492 G
T); (2710 9779508 A G); (2711 9779562 A G); (2712 9780120 C A); (2713 9780627 T C); (2714 9780892 T
C); (2715 9780968 A G); (2716 9781049 C T); (2717 9781056 C G); (2718 9781217 T C); (2719 9781251 A
G); (2720 9781262 G A); (2721 9781304 C T); (2722 9781321 T C); (2723 9781334 C T); (2724 9781522 C
T); (2725 9781653 T C); (2726 9781936 G T); (2727 9782081 G A); (2728 9782175 C T); (2729 9782223 C
T); (2730 9782359 T C); (2731 9782398 A G); (2732 9782604 A T); (2733 9782647 C A); (2734 9782651 C
T); (2735 9782774 T C); (2736 9782828 C T); (2737 9785297 C CA); (2738 9786079 T A); (2739 9786151 T
C); (2740 9786205 C T); (2741 9786299 T C); (2742 9786349 CT C); (2743 9786548 A G); (2744 9786616 A
C); (2745 9786691 G T); (2746 9786972 C G); (2747 9787053 C T); (2748 9787450 G A); (2749 9787587 A
C); (2750 9787603 G C); (2751 9787640 A G); (2752 9787826 T C); (2753 9787879 C CA); (2754 9788105 C
T); (2755 9788257 A G); (2756 9788358 C T); (2757 9788404 A G); (2758 9788426 A T); (2759 9788462 C
A); (2760 9788688 T C); (2761 9788964 G A); (2762 9789035 C T); (2763 9789443 T C); (2764 9789484 C
T); (2765 9789560 A G); (2766 9789638 G T); (2767 9790130 G T); (2768 9790195 A G); (2769 9790197 C
T); (2770 9790731 A G); (2771 9790749 C A); (2772 9790806 C A); (2773 9790843 T C); (2774 9790873 G
A); (2775 9790947 C T); (2776 9791258 G T); (2777 9791523 A G); (2778 9791730 G T); (2779 9791914 A
G); (2780 9791973 G A); (2781 9792129 A G); (2782 9792168 T C); (2783 9792175 T C); (2784 9792176 C
T); (2785 9792185 T C); (2786 9792259 A C); (2787 9792267 A G); (2788 9792369 T C); (2789 9792436 T
C); (2790 9792463 T C); (2791 9792598 C T); (2792 9792801 T C); (2793 9792878 A C); (2794 9793126 C
A); (2795 9793343 C T); (2796 9793569 A C); (2797 9793604 A AC); (2798 9793647 G A); (2799 9793660 C
A); (2800 9793879 C T); (2801 9794277 T C); (2802 9794279 G A); (2803 9794343 A G); (2804 9794394 C
A); (2805 9794813 AT A); (2806 9794873 T C); (2807 9794930 C T); (2808 9794983 A T); (2809 9795131 A
G); (2810 9795235 G A); (2811 9795779 T C); (2812 9795820 G A); (2813 9796041 C T); (2814 9796079
GA G); (2815 9796115 T C); (2816 9796155 C T); (2817 9796208 C CT); (2818 9796285 G A); (2819
9796449 C T); (2820 9796897 C T); (2821 9797014 G C); (2822 9797267 A G); (2823 9797558 C A); (2824
9798278 G A); (2825 9798439 G T); (2826 9798460 T A); (2827 9798562 T G); (2828 9798815 G C); (2829
9798947 A G); (2830 9799007 A G); (2831 9799320 C T); (2832 9799321 T C); (2833 9799332 C T); (2834
9799352 G T); (2835 9799502 G A); (2836 9799519 C T); (2837 9799722 G A); (2838 9799784 G A); (2839
9800018 C T); (2840 9800298 A C); (2841 9800342 T G); (2842 9800345 T C); (2843 9800424 T A); (2844
9800425 T G); (2845 9800494 C T); (2846 9800810 C T); (2847 9801035 T C); (2848 9801085 G T); (2849
9801115 A G); (2850 9801171 G A); (2851 9801385 T G); (2852 9801946 A G); (2853 9802093 C G); (2854
9802244 A T); (2855 9802544 G C); (2856 9802734 A C); (2857 9802793 C A); (2858 9802800 T A); (2859
9802976 T G); (2860 9803272 C T); (2861 9803377 C T); (2862 9803409 T C); (2863 9803766 AG A); (2864
9804039 T C); (2865 9804629 A T); (2866 9805156 G A); (2867 9805186 T A); (2868 9805349 G A); (2869
9805532 AG A); (2870 9805625 C A); (2871 9805717 G A); (2872 9805749 C T); (2873 9805792 T C); (2874
9806164 G A); (2875 9806265 G A); (2876 9806325 G A); (2877 9806392 C T); (2878 9806488 C T); (2879
9806867 A C); (2880 9806921 G A); (2881 9806993 A G); (2882 9807015 C T); (2883 9807197 C T); (2884
9807283 T C); (2885 9807380 C A); (2886 9807521 T C); (2887 9807626 G A); (2888 9807672 G T); (2889
9807815 T C); (2890 9808022 C T); (2891 9808296 T C); (2892 9808342 G A); (2893 9808403 T C); (2894
9808424 G A); (2895 9808444 T C); (2896 9808469 C T); (2897 9808496 A G); (2898 9808499 T C); (2899
9808551 A G); (2900 9808558 C G); (2901 9808569 G T); (2902 9808591 G A); (2903 9808608 C G); (2904
9808630 C T); (2905 9808665 C T); (2906 9808763 A G); (2907 9808901 T C); (2908 9809064 G A); (2909
9809248 G A); (2910 9809278 T C); (2911 9809309 T G); (2912 9809310 T G); (2913 9809326 A G); (2914
9809360 G T); (2915 9809377 T G); (2916 9809459 A C); (2917 9809588 A C); (2918 9809846 TC T); (2919
9810244 C T); (2920 9810812 A T); (2921 9810819 G T); (2922 9810948 C CAT); (2923 9811066 C
G); (2924 9811146 GAGCAA G); (2925 9811190 A G); (2926 9811262 T C); (2927 9811619 A C); (2928
9812024 T C); (2929 9812132 A C); (2930 9812225 A C); (2931 9812287 G GATGTTTA); (2932 9812432 C
T); (2933 9812458 T A); (2934 9812488 T C); (2935 9812518 C A); (2936 9812626 A G); (2937 9812793 G
A); (2938 9812956 C T); (2939 9813090 C T); (2940 9813109 G A); (2941 9813762 T C); (2942 9813848 G
A); (2943 9813867 G A); (2944 9813926 T A); (2945 9814081 G A); (2946 9814119 G A); (2947 9814130 T
C); (2948 9814451 A G); (2949 9814519 G T); (2950 9814598 T C); (2951 9814709 C T); (2952 9814817 A
G); (2953 9814885 A G); (2954 9814919 C T); (2955 9815550 G A); (2956 9815766 G A); (2957 9815823 G
A); (2958 9816196 C T); (2959 9816281 C T); (2960 9816360 T G); (2961 9816371 T A); (2962 9816414 T
A); (2963 9816608 T C); (2964 9816675 A C); (2965 9816729 A G); (2966 9817293 A C); (2967 9817356 A
C); (2968 9817433 A G); (2969 9817751 C A); (2970 9818623 C T); (2971 9818660 C T); (2972 9818672 C
A); (2973 9819066 C T); (2974 9819582 C T); (2975 9819583 A G); (2976 9819683 C T); (2977 9819919 T
C); (2978 9819975 C T); (2979 9820060 A G); (2980 9820599 T G); (2981 9820741 C A); (2982 9820904 A
G); (2983 9820907 A G); (2984 9821607 C A); (2985 9821879 A G); (2986 9822020 G A); (2987 9822107 A
G); (2988 9822276 C T); (2989 9822550 A G); (2990 9822633 T C); (2991 9822875 A T); (2992 9822924 G
A); (2993 9823488 C T); (2994 9823582 T A); (2995 9823585 G A); (2996 9823590 C A); (2997 9824288 G
A); (2998 9824379 G A); (2999 9824435 G A); (3000 9824636 A G); (3001 9824645 A G); (3002 9824723 A
G); (3003 9824814 G A); (3004 9824926 T G); (3005 9825287 G A); (3006 9825885 T C); (3007 9825977 A
G); (3008 9826254 C T); (3009 9826382 A G); (3010 9826415 A G); (3011 9826564 A C); (3012 9826593 G
A); (3013 9826605 G C); (3014 9826667 C A); (3015 9826693 A C); (3016 9826716 A T); (3017 9826759 A
T); (3018 9826786 A G); (3019 9826826 G A); (3020 9826868 G C); (3021 9826896 T G); (3022 9826900 G
A); (3023 9826931 G T); (3024 9826937 C A); (3025 9826979 C T); (3026 9827072 A G); (3027 9827074 A
G); (3028 9827132 A G); (3029 9827156 G T); (3030 9827182 G A); (3031 9827255 T C); (3032 9827398 A
G); (3033 9827400 T C); (3034 9827417 A C); (3035 9827439 A G); (3036 9827473 T C); (3037 9827475 T
C); (3038 9827719 G A); (3039 9827794 T A); (3040 9827807 T C); (3041 9827870 T C); (3042 9827890 G
A); (3043 9827986 G T); (3044 9828061 G A); (3045 9828570 G A); (3046 9828736 G A); (3047 9828855 T
A); (3048 9829045 C T); (3049 9829098 G A); (3050 9829265 C T); (3051 9829370 T A); (3052 9829373 G
T); (3053 9829619 TAAA T); (3054 9829800 G A); (3055 9829840 G T); (3056 9829984 C T); (3057
9830084 C T); (3058 9830166 C T); (3059 9830433 A C); (3060 9830508 A G); (3061 9830891 T C); (3062
9830943 T A); (3063 9830998 A G); (3064 9831089 T G); (3065 9831323 G A); (3066 9831454 G A); (3067
9831506 G A); (3068 9831609 T C); (3069 9831681 T C); (3070 9831767 T C); (3071 9831805 T C); (3072
9831902 T C); (3073 9832129 C G); (3074 9832601 G A); (3075 9832625 A G); (3076 9832834 C A); (3077
9832984 T C); (3078 9833602 G T); (3079 9834328 C T); (3080 9836536 C G); (3081 9836644 C T); (3082
9837562 G A); (3083 9841546 G A); (3084 9841692 G T); (3085 9841857 C T); (3086 9842190 G A); (3087
9843163 G A); (3088 9843175 C T); (3089 9843187 A G); (3090 9843219 T C); (3091 9843226 G A); (3092
9844163 G A); (3093 9844211 C T); (3094 9844220 T C); (3095 9844235 G C); (3096 9844249 A G); (3097
9845319 A G); (3098 9845375 G C); (3099 9845406 G T); (3100 9845453 C T); (3101 9845578 G A); (3102
9845589 T C); (3103 9845595 T C); (3104 9845596 A G); (3105 9845603 C A); (3106 9845686 C T); (3107
9845716 C T); (3108 9845725 G A); (3109 9846033 A G); (3110 9846051 G A); (3111 9846133 T G); (3112
9846193 T A); (3113 9846463 T TAA); (3114 9846547 A T); (3115 9846809 C T); (3116 9847168 G
A); (3117 9847275 A T); (3118 9847377 A G); (3119 9847581 A G); (3120 9847791 T C); (3121 9848747 C
T); (3122 9848905 T C); (3123 9849044 C T); (3124 9849048 C T); (3125 9849090 C T); (3126 9849155 TT
AA); (3127 9849195 G A); (3128 9849430 A G); (3129 9849531 C G); (3130 9850344 T C); (3131 9850431
A G); (3132 9850638 AT A); (3133 9850709 C G); (3134 9850832 C T); (3135 9850843 C T); (3136 9850899
T C); (3137 9850949 G A); (3138 9851121 T C); (3139 9851122 G A); (3140 9851130 C T); (3141 9851304
C A); (3142 9851357 G A); (3143 9851443 C A); (3144 9851460 A G); (3145 9851492 A G); (3146 9851523
G A); (3147 9851541 C G); (3148 9851605 A G); (3149 9851672 A G); (3150 9851696 A G); (3151 9851761
C T); (3152 9852000 C T); (3153 9852023 T C); (3154 9852049 C T); (3155 9852068 C T); (3156 9852093 T
C); (3157 9852905 C T); (3158 9852956 C A); (3159 9852998 T C); (3160 9853007 G A); (3161 9853123 T
C); (3162 9853181 C T); (3163 9853205 T C); (3164 9853208 C A); (3165 9853231 A G); (3166 9853237 G
A); (3167 9853239 T C); (3168 9853334 G T); (3169 9853397 A G); (3170 9853404 C T); (3171 9853408 C
T); (3172 9853736 G A); (3173 9854036 A C); (3174 9854055 C T); (3175 9854327 C T); (3176 9854441 C
T); (3177 9854600 A C); (3178 9854816 T C); (3179 9854885 G A); (3180 9854914 T C); (3181 9854964 T
C); (3182 9854979 C CG); (3183 9855002 T C); (3184 9855169 T A); (3185 9855239 G A); (3186 9855272 C
T); (3187 9855374 C T); (3188 9855403 G A); (3189 9855486 G GC); (3190 9855824 A G); (3191 9855975
C T); (3192 9856479 C T); (3193 9856494 G A); (3194 9856568 C T); (3195 9856574 T C); (3196 9856627 C
T); (3197 9856666 A T); (3198 9856709 A C); (3199 9857102 C T); (3200 9857288 T C); (3201 9857825 A
C); (3202 9857941 A G); (3203 9858163 T C); (3204 9858606 A AC); (3205 9858710 T G); (3206 9858902 G
T); (3207 9859326 T A); (3208 9859411 C A); (3209 9859610 G A); (3210 9859641 G A); (3211 9859871 C
A); (3212 9860012 G A); (3213 9860109 T C); (3214 9860142 A G); (3215 9860636 C T); (3216 9860685 T
C); (3217 9860896 C A); (3218 9860933 T G); (3219 9860956 A G); (3220 9860998 A G); (3221 9861062 G
T); (3222 9861131 A G); (3223 9861165 T C); (3224 9861300 G C); (3225 9861309 G T); (3226 9861447 A
G); (3227 9861497 T C); (3228 9861505 C T); (3229 9861570 T C); (3230 9861586 G A); (3231 9861653 T
C); (3232 9861740 G A); (3233 9861849 T C); (3234 9861954 T C); (3235 9862004 G A); (3236 9862031 T
C); (3237 9862067 G A); (3238 9862072 G A); (3239 9862181 G A); (3240 9862191 G A); (3241 9862239 G
GT); (3242 9862335 C T); (3243 9862618 T C); (3244 9862814 T C); (3245 9862855 T C); (3246 9863164 G
C); (3247 9863286 T C); (3248 9863391 G C); (3249 9863543 AAGAGCT A); (3250 9863794 G A); (3251
9863821 G C); (3252 9864139 T C); (3253 9864174 A G); (3254 9864208 T C); (3255 9864233 C T); (3256
9864533 AT A); (3257 9864628 T C); (3258 9864967 C T); (3259 9864978 GA G); (3260 9865086 A
G); (3261 9865198 C T); (3262 9865203 T C); (3263 9865337 C T); (3264 9865340 G A); (3265 9865349 A
C); (3266 9865437 C T); (3267 9865459 T C); (3268 9865465 T A); (3269 9865469 T C); (3270 9865563 T
C); (3271 9865658 T TA); (3272 9866004 A T); (3273 9866081 T G); (3274 9866292 T TA); (3275 9866808
A G); (3276 9867099 G A); (3277 9868338 G A); (3278 9868372 TTAATACAA T); (3279 9868487 C
A); (3280 9868591 C T); (3281 9868771 G A); (3282 9868790 A T); (3283 9868854 G C); (3284 9868987 C
A); (3285 9869259 T A); (3286 9869261 AT A); (3287 9869505 A C); (3288 9869545 T G); (3289 9869573 G
T); (3290 9869936 T C); (3291 9869999 A AT); (3292 9870073 GT G); (3293 9870188 C A); (3294 9870204
T C); (3295 9870277 A G); (3296 9870279 G C); (3297 9870381 C G); (3298 9870578 T C); (3299 9870795
C A); (3300 9870928 C T); (3301 9870996 A G); (3302 9871299 T A); (3303 9871451 A T); (3304 9871506
G A); (3305 9871613 T C); (3306 9871669 G A); (3307 9871792 T C); (3308 9871818 A G); (3309 9872014
G A); (3310 9872030 T G); (3311 9872223 A G); (3312 9872291 A G); (3313 9872325 G A); (3314 9872367
A G); (3315 9872415 C T); (3316 9872444 C A); (3317 9872512 AT A); (3318 9872539 T C); (3319 9872585
T C); (3320 9872641 A G); (3321 9872757 G A); (3322 9872775 G A); (3323 9873097 A G); (3324 9873375
A T); (3325 9873519 T C); (3326 9873562 C T); (3327 9873602 A G); (3328 9873778 G A); (3329 9874260
G A); (3330 9874350 C T); (3331 9874471 G A); (3332 9874503 A G); (3333 9874520 A G); (3334 9874652
G A); (3335 9874677 A G); (3336 9874685 T C); (3337 9874699 C T); (3338 9874820 T C); (3339 9874889 T
C); (3340 9875045 A G); (3341 9875048 T C); (3342 9875107 A G); (3343 9875359 A G); (3344 9875470 A
G); (3345 9875477 TA T); (3346 9875550 G A); (3347 9875600 G T); (3348 9875606 T C); (3349 9875685 A
C); (3350 9875753 C T); (3351 9875851 C A); (3352 9876086 C T); (3353 9876189 A G); (3354 9876199 A
G); (3355 9876211 T C); (3356 9876256 C T); (3357 9876451 A G); (3358 9876555 A G); (3359 9876568 A
AT); (3360 9876703 T C); (3361 9876726 G A); (3362 9876737 A G); (3363 9876754 A G); (3364 9876803
A G); (3365 9876886 G A); (3366 9876999 C T); (3367 9877028 C T); (3368 9877103 A T); (3369 9877298
C T); (3370 9877327 A G); (3371 9877429 G C); (3372 9877431 T C); (3373 9877435 A G); (3374 9877446
A G); (3375 9877552 T C); (3376 9877570 G A); (3377 9877969 G T); (3378 9878023 C T); (3379 9878081
C T); (3380 9878082 A G); (3381 9878246 G A); (3382 9878263 T C); (3383 9878301 C A); (3384 9878351
A G); (3385 9878364 T A); (3386 9878665 A G); (3387 9878698 T C); (3388 9878859 A C); (3389 9878916
T C); (3390 9879047 T C); (3391 9879061 G A); (3392 9879138 A G); (3393 9879139 A T); (3394 9879232
T A); (3395 9879362 G A); (3396 9879438 C T); (3397 9879450 T C); (3398 9879470 T G); (3399 9879482
A G); (3400 9879484 C T); (3401 9879496 A G); (3402 9879572 T C); (3403 9879979 T C); (3404 9880477
G A); (3405 9880505 C T); (3406 9880601 T C); (3407 9880685 C T); (3408 9880695 C T); (3409 9880737 A
G); (3410 9880747 T C); (3411 9880830 T G); (3412 9880910 A G); (3413 9880927 T G); (3414 9880943 G
T); (3415 9881025 G A); (3416 9882564 A G); (3417 9882658 A G); (3418 9882741 G A); (3419 9882755 G
T); (3420 9882898 T C); (3421 9883078 C T); (3422 9883089 CT C); (3423 9883526 A G); (3424 9883661 A
G); (3425 9883784 T C); (3426 9883789 G C); (3427 9883803 A G); (3428 9884181 G A); (3429 9884183 A
C); (3430 9884440 A G); (3431 9885028 G A); (3432 9885326 G A); (3433 9885338 A G); (3434 9885519 G
A); (3435 9885598 G T); (3436 9885742 A G); (3437 9885860 T C); (3438 9886606 A G); (3439 9886788 A
T); (3440 9887193 A G); (3441 9887488 A G); (3442 9887669 T G); (3443 9887897 A G); (3444 9888383 T
G); (3445 9888430 G A); (3446 9888529 C T); (3447 9888530 G A); (3448 9888572 A G); (3449 9888651 A
G); (3450 9888685 G A); (3451 9888698 A G); (3452 9888897 G A); (3453 9888936 T C); (3454 9889109 A
C); (3455 9889680 A G); (3456 9889906 G A); (3457 9890183 T C); (3458 9890409 A G); (3459 9890441 A
T); (3460 9890795 C T); (3461 9890856 C T); (3462 9890877 GTGA G); (3463 9890881 T C); (3464
9890892 G A); (3465 9890976 T C); (3466 9891033 A G); (3467 9891118 T C); (3468 9891201 T C); (3469
9891279 G A); (3470 9891424 G T); (3471 9891484 T C); (3472 9891498 G A); (3473 9891528 C T); (3474
9891590 C T); (3475 9891826 G T); (3476 9891827 C T); (3477 9891850 G T); (3478 9891960 C T); (3479
9891995 G A); (3480 9892173 G A); (3481 9892236 A G); (3482 9892404 A G); (3483 9892521 G A); (3484
9892553 A G); (3485 9892581 C T); (3486 9892592 T C); (3487 9892629 G A); (3488 9892763 T C); (3489
9892787 C T); (3490 9893054 G A); (3491 9893065 T C); (3492 9893108 A G); (3493 9893132 G A); (3494
9893161 T C); (3495 9893239 A G); (3496 9893272 G A); (3497 9893283 G T); (3498 9893327 T G); (3499
9893359 G A); (3500 9893457 C A); (3501 9893732 A G); (3502 9893972 G A); (3503 9894095 G A); (3504
9894315 G A); (3505 9894411 A G); (3506 9894489 C T); (3507 9894619 A G); (3508 9895052 C T); (3509
9895330 A G); (3510 9895424 G A); (3511 9895458 A G); (3512 9895578 T C); (3513 9895595 CG
C); (3514 9895671 C T); (3515 9896134 T C); (3516 9896333 G A); (3517 9897167 C T); (3518 9897254 C
A); (3519 9897524 A G); (3520 9897866 A G); (3521 9898720 C A); (3522 9898843 A C); (3523 9898926 T
TAC); (3524 9898933 C A); (3525 9899029 A C); (3526 9899056 C T); (3527 9899064 G T); (3528 9899076
A G); (3529 9899135 C T); (3530 9899161 T C); (3531 9899162 A G); (3532 9899172 A G); (3533 9900237
A G); (3534 9900282 T C); (3535 9900387 T C); (3536 9900434 A G); (3537 9900931 T A); (3538 9901519
T C); (3539 9901560 A G); (3540 9901759 T C); (3541 9901823 A G); (3542 9902035 T C); (3543 9902136 T
C); (3544 9902152 T TACGA); (3545 9902241 G A); (3546 9902373 T A); (3547 9902388 TA T); (3548
9902412 T G); (3549 9902731 C G); (3550 9903060 G GA); (3551 9903113 C T); (3552 9903289 A
G); (3553 9903296 G T); (3554 9903390 C A); (3555 9903475 C A); (3556 9903479 GA G); (3557 9903587
G A); (3558 9903618 G A); (3559 9903971 C T); (3560 9904003 A G); (3561 9904370 A AC); (3562
9904583 A C); (3563 9905036 C T); (3564 9905190 T C); (3565 9905530 G A); (3566 9905558 T
TGTTTTTGAA); (3567 9905571 T G); (3568 9905725 T G); (3569 9905799 G A); (3570 9905809 A G); (3571
9905883 G A); (3572 9905931 C T); (3573 9905998 C T); (3574 9906021 G A); (3575 9906084 A G); (3576
9906100 C A); (3577 9906218 G A); (3578 9906414 G A); (3579 9906654 T C); (3580 9906669 TA T); (3581
9907725 T C); (3582 9907811 AC A); (3583 9907875 A G); (3584 9908117 G A); (3585 9908249 G
A); (3586 9908265 T G); (3587 9908315 A G); (3588 9908692 A T); (3589 9908722 T C); (3590 9908771 G
A); (3591 9908815 C T); (3592 9908933 C T); (3593 9909070 T C); (3594 9909099 C T); (3595 9909227 A
G); (3596 9909339 G C); (3597 9909387 G A); (3598 9909591 A G); (3599 9910286 G C); (3600 9910499 T
C); (3601 9910665 G A); (3602 9910696 GT G); (3603 9910821 T G); (3604 9911261 G A); (3605 9911515
A C); (3606 9912168 T C); (3607 9912192 A G); (3608 9912198 G A); (3609 9912208 T C); (3610 9912455
A G); (3611 9912486 A G); (3612 9912505 G A); (3613 9912511 A G); (3614 9912554 T C); (3615 9912603
A G); (3616 9912680 C T); (3617 9912698 T C); (3618 9912748 G C); (3619 9912788 C T); (3620 9912847
A G); (3621 9912959 C T); (3622 9913175 A G); (3623 9913278 A G); (3624 9913306 T C); (3625 9913476
A G); (3626 9913737 A G); (3627 9913738 A C); (3628 9913784 A G); (3629 9914091 A G); (3630 9914143
A G); (3631 9914179 A G); (3632 9914283 G A); (3633 9914288 A G); (3634 9914433 A G); (3635 9914445
C T); (3636 9914455 T C); (3637 9914630 A G); (3638 9914706 C T); (3639 9914715 C T); (3640 9914723 G
A); (3641 9914764 T C); (3642 9914843 T G); (3643 9914865 A G); (3644 9914988 T C); (3645 9915110 T
A); (3646 9915477 G A); (3647 9915480 T G); (3648 9915485 T C); (3649 9915699 G T); (3650 9915887 G
A); (3651 9916562 G A); (3652 9916666 A G); (3653 9916668 C T); (3654 9917066 C T); (3655 9917206 A
C); (3656 9917348 G A); (3657 9917355 G T); (3658 9917369 G A); (3659 9917655 G A); (3660 9917762 T
A); (3661 9917879 A G); (3662 9918216 T C); (3663 9918470 A G); (3664 9918725 G A); (3665 9918902 T
C); (3666 9918935 G A); (3667 9918994 T C); (3668 9919069 A G); (3669 9919269 C T); (3670 9920109 T
C); (3671 9920590 A G); (3672 9920698 A G); (3673 9920834 C T); (3674 9921059 T C); (3675 9921079 G
A); (3676 9921115 G A); (3677 9921226 T C); (3678 9921275 A G); (3679 9921854 G A); (3680 9921975 T
G); (3681 9922069 T C); (3682 9922139 T C); (3683 9922394 A C); (3684 9922457 T C); (3685 9922525 T
C); (3686 9922569 C A); (3687 9922686 T C); (3688 9922717 G A); (3689 9922908 T C); (3690 9922962 A
G); (3691 9923309 A T); (3692 9923463 G A); (3693 9923509 C CT); (3694 9923948 T C); (3695 9924577 G
A); (3696 9925033 T C); (3697 9925391 A G); (3698 9925524 C T); (3699 9925625 G C); (3700 9925734 A
G); (3701 9925738 A T); (3702 9925767 T C); (3703 9926198 G A); (3704 9926476 C T); (3705 9926600 T
C); (3706 9926777 G A); (3707 9926946 A G); (3708 9927015 T C); (3709 9927031 T G); (3710 9927175 T
C); (3711 9927387 T C); (3712 9927435 A G); (3713 9927625 T C); (3714 9927711 T C); (3715 9927724 G
A); (3716 9927981 T A); (3717 9928077 T C); (3718 9928123 G A); (3719 9928152 A C); (3720 9928153 G
A); (3721 9928154 T C); (3722 9928155 G T); (3723 9928317 A C); (3724 9928325 C T); (3725 9928657 C
T); (3726 9928750 C T); (3727 9928858 A G); (3728 9928955 C A); (3729 9928974 A C); (3730 9929121 A
T); (3731 9929240 T C); (3732 9929274 C T); (3733 9929420 A G); (3734 9929491 A G); (3735 9929508
ACCC A); (3736 9929757 C G); (3737 9929791 G A); (3738 9929862 G A); (3739 9930019 A G); (3740
9930100 T A); (3741 9930119 C T); (3742 9930124 A G); (3743 9930125 G C); (3744 9930126 C T); (3745
9930165 G GA); (3746 9930189 A G); (3747 9930213 A T); (3748 9930245 G A); (3749 9930273 GA
G); (3750 9930503 A G); (3751 9931046 T C); (3752 9931102 T G); (3753 9931390 A G); (3754 9931401 T
C); (3755 9931433 C A); (3756 9931437 G A); (3757 9931460 T C); (3758 9931761 A G); (3759 9931871 T
C); (3760 9932054 T C); (3761 9932294 C T); (3762 9932592 C T); (3763 9932719 G A); (3764 9932738 C
T); (3765 9932815 T A); (3766 9933143 G A); (3767 9935529 T C); (3768 9937601 G A); (3769 9937905 T
A); (3770 9938288 G A); (3771 9938493 C G); (3772 9938553 T C); (3773 9938715 C T); (3774 9938930 T
C); (3775 9939035 C A); (3776 9939296 C A); (3777 9939396 A G); (3778 9939638 T C); (3779 9939650 G
A); (3780 9939678 C A); (3781 9939838 C T); (3782 9940006 C A); (3783 9940114 C T); (3784 9940171 A
C); (3785 9940211 A T); (3786 9940319 G A); (3787 9940325 A G); (3788 9940327 T G); (3789 9940413 T
C); (3790 9940420 A G); (3791 9940450 T A); (3792 9940481 T A); (3793 9940587 T C); (3794 9941272 C
T); (3795 9941367 A G); (3796 9941776 A C); (3797 9941805 G T); (3798 9941918 C T); (3799 9942111 T
C); (3800 9942219 A G); (3801 9942404 A G); (3802 9943103 G A); (3803 9943180 C T); (3804 9943239 A
G); (3805 9943449 A T); (3806 9943521 A G); (3807 9943535 T G); (3808 9943560 A G); (3809 9943615 A
C); (3810 9943618 G A); (3811 9944209 G A); (3812 9944334 G A); (3813 9944396 T C); (3814 9944408 C
G); (3815 9944494 C T); (3816 9944565 C T); (3817 9944834 G A); (3818 9944960 T C); (3819 9945158 T
C); (3820 9945623 G A); (3821 9945742 A G); (3822 9945758 A G); (3823 9945774 TTG T); (3824 9945807
G A); (3825 9946109 A G); (3826 9946207 A T); (3827 9946246 T A); (3828 9946328 G A); (3829 9946332
A T); (3830 9946402 G A); (3831 9946409 C T); (3832 9946774 T G); (3833 9947270 G C); (3834 9947455
T A); (3835 9947465 A G); (3836 9947528 A G); (3837 9947582 CA C); (3838 9948002 T G); (3839
9948235 CT C); (3840 9948816 C T); (3841 9948927 G T); (3842 9949058 A G); (3843 9949324 C T); (3844
9950465 A G); (3845 9950682 G T); (3846 9950858 C T); (3847 9951041 T C); (3848 9951374 T C); (3849
9951588 C T); (3850 9951619 A G); (3851 9951641 T G); (3852 9952034 T C); (3853 9952244 G A); (3854
9952472 G C); (3855 9953284 C T); (3856 9953346 C T); (3857 9953356 G A); (3858 9953386 C T); (3859
9953709 T TG); (3860 9954093 C A); (3861 9954174 C T); (3862 9954191 T C); (3863 9955211 G T); (3864
9960674 C G); (3865 9961405 A G); (3866 9961697 C T); (3867 9961993 A G); (3868 9962057 A T); (3869
9962241 C T); (3870 9962252 T C); (3871 9962637 T A); (3872 9963980 G T); (3873 9964360 AT A); (3874
9964369 C T); (3875 9964550 G A); (3876 9964595 T C); (3877 9964712 A C); (3878 9964741 A G); (3879
9965412 A G); (3880 9965530 G A); (3881 9965713 T A); (3882 9965849 T G); (3883 9966890 G T); (3884
9967200 G A); (3885 9967519 G A); (3886 9967528 A AAGGTG); (3887 9968097 G C); (3888 9968304 A
G); (3889 9968306 G A); (3890 9968310 A G); (3891 9968349 T A); (3892 9968642 A G); (3893 9969360
AG A); (3894 9969430 G C); (3895 9969527 T TA); (3896 9973835 T A); (3897 9974181 A G); (3898
9974474 C T); (3899 9974728 A G); (3900 9974770 C T); (3901 9975289 G A); (3902 9975477 A G); (3903
9975478 C T); (3904 9975528 G A); (3905 9975784 C T); (3906 9976194 C T); (3907 9976237 C T); (3908
9976253 GCAACTTTTGGCAACA G); (3909 9976347 T G); (3910 9977196 G A); (3911 9977551 A G); (3912
9978449 G A); (3913 9979145 T C); (3914 9979171 T C); (3915 9979232 A C); (3916 9979377 C T); (3917
9979821 C G); (3918 9980013 A T); (3919 9980369 A T); (3920 9981001 C T); (3921 9981095 G A); (3922
9981139 A G); (3923 9981251 A G); (3924 9981380 C T); (3925 9981385 C T); (3926 9981781 C T); (3927
9982256 A AG); (3928 9982469 A G); (3929 9982606 C G); (3930 9982763 T C); (3931 9983262 A
G); (3932 9983560 G C); (3933 9983591 G A); (3934 9983809 T G); (3935 9983856 T C); (3936 9984336 A
G); (3937 9984558 G T); (3938 9984639 C T); (3939 9985324 C T); (3940 9985467 C T); (3941 9985875 T
G); (3942 9986240 T C); (3943 9986710 C T); (3944 9986714 G A); (3945 9986721 A C); (3946 9987822 G
A); (3947 9987863 T A); (3948 9987883 A G); (3949 9988484 A G); (3950 9988993 G A); (3951 9989478 T
C); (3952 9990366 T C); (3953 9990917 C T); (3954 9991022 C A); (3955 9991164 A AG); (3956 9991206 A
G); (3957 9991254 A G); (3958 9991328 T C); (3959 9991900 G A); (3960 9991938 T C); (3961 9992163 G
A); (3962 9992893 G C); (3963 9993582 T C); (3964 9993843 C T); (3965 9993959 T C); (3966 9994102 G
A); (3967 9994222 C T); (3968 9994255 C T); (3969 9994675 A C); (3970 10004835 G A); (3971 10004895
A G); (3972 10005182 G A); (3973 10005221 G A); (3974 10005443 C T); (3975 10005953 A G); (3976
10006306 A G); (3977 10006308 C T); (3978 10006468 G A); (3979 10006765 G T); (3980 10007105 A
G); (3981 10007301 C T); (3982 10007828 G A); (3983 10007888 C A); (3984 10008071 G T); (3985
10008094 G A); (3986 10008238 T C); (3987 10008717 A G); (3988 10009156 G A); (3989 10009892 T
C); (3990 10010699 T C); (3991 10010904 A G); (3992 10010960 T C); (3993 10011197 C T); (3994
10011566 A G); (3995 10011574 G T); (3996 10011634 A G); (3997 10012253 T C); (3998 10012341 G
A); (3999 10012386 A G); (4000 10012660 G C); (4001 10013472 G T); (4002 10013582 G A); (4003
10013744 T G); (4004 10013846 G T); (4005 10013958 A T); (4006 10014019 G A); (4007 10014357 A
C); (4008 10014469 A G); (4009 10014597 T G); (4010 10015872 C A); (4011 10016062 C T); (4012
10016491 A C); (4013 10016721 C T); (4014 10016751 A G); (4015 10016879 C T); (4016 10016883 A
G); (4017 10017093 T C); (4018 10017166 A G); (4019 10017217 G A); (4020 10017253 T C); (4021
10018002 G A); (4022 10018081 G A); (4023 10018452 T C); (4024 10018461 A G); (4025 10018539 A
G); (4026 10018545 G T); (4027 10018551 G A); (4028 10018581 C T); (4029 10018590 C T); (4030
10018828 A G); (4031 10019076 G A); (4032 10019111 T C); (4033 10019127 C T); (4034 10019821 T
C); (4035 10020301 T C); (4036 10020504 A G); (4037 10020700 C T); (4038 10020833 A G); (4039
10021015 A G); (4040 10021186 C T); (4041 10021187 A G); (4042 10021203 A AT); (4043 10021657 G
A); (4044 10021664 C T); (4045 10022082 A T); (4046 10022124 G C); (4047 10022967 T C); (4048
10023821 G T); (4049 10023952 G A); (4050 10023956 T C); (4051 10024003 A G); (4052 10024227 G
A); (4053 10024331 T C); (4054 10024489 A G); (4055 10024510 A C); (4056 10025699 T C); (4057
10026639 T G); (4058 10027233 G A); (4059 10027551 G C); (4060 10027847 A T); (4061 10028076 T
A); (4062 10028082 C T); (4063 10028290 T C); (4064 10029886 C T); (4065 10030086 T A); (4066
10030409 T A); (4067 10030748 C T); (4068 10030850 G A); (4069 10030946 C T); (4070 10031562 A
T); (4071 10031826 C T); (4072 10031859 T G); (4073 10032867 A G); (4074 10033301 A C); (4075
10033750 A C); (4076 10033756 A G); (4077 10034385 T G); (4078 10034895 G T); (4079 10034926 C
T); (4080 10036079 A G); (4081 10036267 A G); (4082 10036269 G A); (4083 10036283 C T); (4084
10036284 A G); (4085 10036333 C CA); (4086 10036379 G A); (4087 10036442 T C); (4088 10037382 T
TA); (4089 10037891 T A); (4090 10038900 T C); (4091 10040185 C A); (4092 10040535 A C); (4093
10040806 A G); (4094 10040991 C G); (4095 10041798 C G); (4096 10042843 T C); (4097 10043955 CT
C); (4098 10044388 A G); (4099 10044537 C T); (4100 10045127 AT A); (4101 10045162 T TA); (4102
10045290 G A); (4103 10045361 G T); (4104 10045739 C T); (4105 10046273 C T); (4106 10046413 G
A); (4107 10046416 G A); (4108 10046421 C T); (4109 10046604 C T); (4110 10046805 T C); (4111
10046903 T C); (4112 10046940 A G); (4113 10047874 C T); (4114 10048486 T G); (4115 10048931 A
G); (4116 10049774 T C); (4117 10049788 G A); (4118 10050487 C T); (4119 10050608 T C); (4120
10050802 G A); (4121 10051024 C T); (4122 10051175 G T); (4123 10051286 A G); (4124 10051307 A
G); (4125 10051393 T G); (4126 10051481 C T); (4127 10051871 C T); (4128 10051916 A T); (4129
10052086 A G); (4130 10052527 A G); (4131 10052671 G T); (4132 10052715 G A); (4133 10052735 G
T); (4134 10052878 T A); (4135 10053591 A G); (4136 10053595 C T); (4137 10054478 T C); (4138
10054531 G A); (4139 10055199 G A); (4140 10055830 C T); (4141 10056012 A ATTATCTATCTT); (4142
10056308 C G); (4143 10056735 G A); (4144 10056825 T C); (4145 10056912 C A); (4146 10056972 G
A); (4147 10057072 G C); (4148 10057124 C T); (4149 10058310 A G); (4150 10058923 T C); (4151
10061737 C CT); (4152 10061964 T A); (4153 10061989 G A); (4154 10062027 G A); (4155 10062090 G
A); (4156 10062512 A G); (4157 10062529 A G); (4158 10063839 T C); (4159 10064510 G T); (4160
10064774 G A); (4161 10065555 A G); (4162 10065568 A T); (4163 10065727 T G); (4164 10065804 T
C); (4165 10065887 C T); (4166 10067105 C T); (4167 10067146 T C); (4168 10067826 TA T); (4169
10068365 C T); (4170 10069045 A G); (4171 10069943 T TCAGG); (4172 10070284 G T); (4173 10070400
A G); (4174 10070518 G A); (4175 10071616 G A); (4176 10071739 T G); (4177 10071864 G A); (4178
10071931 TA T); (4179 10072931 A G); (4180 10073443 T A); (4181 10073983 G A); (4182 10074096 T
C); (4183 10074410 T C); (4184 10074721 T C); (4185 10074823 G A); (4186 10074996 C T); (4187
10074999 C T); (4188 10075344 T C); (4189 10075652 A G); (4190 10077388 T C); (4191 10079298 A
G); (4192 10079901 A G); (4193 10080933 C T); (4194 10081328 T C); (4195 10081410 G A); (4196
10082486 T C); (4197 10082575 G A); (4198 10083027 G T); (4199 10083052 T C); (4200 10083901 T
C); (4201 10083942 C G); (4202 10084430 C T); (4203 10084501 T C); (4204 10084921 T C); (4205
10085379 C A); (4206 10085949 C T); (4207 10086422 T C); (4208 10087025 C G); (4209 10087625 G
A); (4210 10087655 C T); (4211 10087674 G A); (4212 10087693 C T); (4213 10087759 T C); (4214
10087761 C T); (4215 10087973 T G); (4216 10088261 C T); (4217 10088410 C T); (4218 10088944 G
A); (4219 10090036 T C); (4220 10090206 A G); (4221 10090671 A G); (4222 10091409 T C); (4223
10092226 T A); (4224 10092370 T C); (4225 10093615 C T); (4226 10093774 A G); (4227 10093893 T
C); (4228 10093908 A T); (4229 10094020 C T); (4230 10094169 C CG); (4231 10094571 C T); (4232
10094854 A G); (4233 10096086 C T); (4234 10096148 G A); (4235 10096402 T C); (4236 10096961 G
A); (4237 10097227 C T); (4238 10097337 T C); (4239 10097382 C T); (4240 10097436 C T); (4241
10097500 T G); (4242 10097513 G C); (4243 10097537 C T); (4244 10097669 T C); (4245 10097831 T
G); (4246 10097983 A T); (4247 10098092 T C); (4248 10098106 A C); (4249 10098433 A G); (4250
10098685 G A); (4251 10098744 T C); (4252 10098762 T C); (4253 10099010 A G); (4254 10099337 G
A); (4255 10099526 T C); (4256 10099655 T TTGGATGTG); (4257 10099738 C A); (4258 10099752 T
C); (4259 10100328 A G); (4260 10100358 G A); (4261 10100921 G T); (4262 10101583 A G); (4263
10101632 G A); (4264 10102482 T G); (4265 10102630 T C); (4266 10102932 G A); (4267 10103239 C
CTT); (4268 10103286 T C); (4269 10103367 T C); (4270 10103405 T A); (4271 10103407 T A); (4272
10103409 T A); (4273 10103417 T TTA); (4274 10103420 C T); (4275 10103978 C T); (4276 10104212 G
T); (4277 10104589 C G); (4278 10104636 A C); (4279 10105983 A AT); (4280 10106219 A G); (4281
10107331 C A); (4282 10107632 A AT); (4283 10107740 T G); (4284 10107982 G A); (4285 10108364 A
G); (4286 10108492 A T); (4287 10108590 T C); (4288 10108618 T C); (4289 10108664 T C); (4290
10108683 C T); (4291 10108929 C T); (4292 10109447 G A); (4293 10109462 T A); (4294 10111136 A
G); (4295 10111177 A T); (4296 10111307 G A); (4297 10111349 AT A); (4298 10111693 G A); (4299
10112093 G T); (4300 10112215 A G); (4301 10112304 G A); (4302 10112375 G A); (4303 10112638 T
C); (4304 10112784 CA C); (4305 10112845 A C); (4306 10113055 TAA T); (4307 10113155 A AAT); (4308
10113206 A G); (4309 10114307 A G); (4310 10114463 A G); (4311 10114629 G A); (4312 10114937 C
T); (4313 10115696 G A); (4314 10116329 T C); (4315 10116379 G A); (4316 10116380 G A); (4317
10116627 T C); (4318 10116808 A G); (4319 10116985 T C); (4320 10117060 A G); (4321 10117132 T
G); (4322 10117154 A G); (4323 10117746 G A); (4324 10118652 G T); (4325 10118749 A G); (4326
10119495 T C); (4327 10119846 T G); (4328 10119978 C G); (4329 10120366 A G); (4330 10120512 A
G); (4331 10120699 T C); (4332 10120864 T C); (4333 10121466 A G); (4334 10121589 G A); (4335
10121791 C A); (4336 10121803 A T); (4337 10122080 C T); (4338 10122092 A G); (4339 10122119 G
T); (4340 10122227 T C); (4341 10122239 C T); (4342 10122408 T A); (4343 10122437 C T); (4344
10124209 T C); (4345 10124597 G A); (4346 10124602 T A); (4347 10125679 G T); (4348 10126825 C
T); (4349 10127307 A T); (4350 10127823 A AT); (4351 10128142 G A); (4352 10128403 A C); (4353
10128468 A T); (4354 10128514 G A); (4355 10128548 G A); (4356 10128796 A G); (4357 10129033 T
C); (4358 10129213 C T); (4359 10129263 A G); (4360 10129342 G A); (4361 10129459 G A); (4362
10129492 C CTG); (4363 10129837 A AAT); (4364 10130006 C T); (4365 10130099 C A); (4366 10130338
A G); (4367 10130372 G A); (4368 10130665 G A); (4369 10130804 C T); (4370 10131119 C T); (4371
10131250 G A); (4372 10131317 T C); (4373 10131417 C T); (4374 10131726 T C); (4375 10131796 C
T); (4376 10131842 G A); (4377 10131914 T C); (4378 10132155 G A); (4379 10132246 A G); (4380
10132366 G A); (4381 10132472 A C); (4382 10132576 C G); (4383 10132590 C T); (4384 10132661 G
A); (4385 10132704 A G); (4386 10132986 C T); (4387 10132999 C T); (4388 10133070 G A); (4389
10133188 T C); (4390 10133320 A C); (4391 10133823 G T); (4392 10133915 T TTTTA); (4393 10134043 T
C); (4394 10134453 T C); (4395 10134492 G A); (4396 10134908 GT G); (4397 10134993 T A); (4398
10135584 T G); (4399 10135617 C CTAGA); (4400 10136138 G A); (4401 10136188 G A); (4402 10136201
G A); (4403 10136240 A G); (4404 10136299 A G); (4405 10136470 G A); (4406 10137297 C T); (4407
10137302 G A); (4408 10137365 T G); (4409 10137487 T C); (4410 10137617 A G); (4411 10137716 C
T); (4412 10137806 C T); (4413 10138573 C CACGTGG); (4414 10138612 G A); (4415 10138667 G
A); (4416 10138774 A T); (4417 10138803 T C); (4418 10139527 TA T); (4419 10139669 AT A); (4420
10140391 A T); (4421 10140491 A C); (4422 10142202 G C); (4423 10142459 G C); (4424 10142796 C
T); (4425 10142852 C T); (4426 10143253 T C); (4427 10143465 G A); (4428 10143666 A T); (4429
10144143 T C); (4430 10144731 T C); (4431 10144773 C A); (4432 10145171 C T); (4433 10145331 G
A); (4434 10145454 T C); (4435 10145811 TGAAGCTTCC T); (4436 10145825 G A); (4437 10145900 C
T); (4438 10146000 C T); (4439 10146109 C T); (4440 10146461 A G); (4441 10146508 TATAACC T); (4442
10146587 C A); (4443 10146638 C A); (4444 10147277 T C); (4445 10147472 A G); (4446 10147489 T
C); (4447 10147594 A G); (4448 10147654 G A); (4449 10147990 T G); (4450 10148018 G A); (4451
10148071 G A); (4452 10148386 G A); (4453 10148891 T C); (4454 10149197 G A); (4455 10149295 C
T); (4456 10149433 T C); (4457 10149527 C T); (4458 10149651 G C); (4459 10149910 A C); (4460
10149964 A G); (4461 10150154 A G); (4462 10151050 A G); (4463 10151187 C A); (4464 10151784 T
C); (4465 10151931 T G); (4466 10152030 A G); (4467 10152367 C G); (4468 10152422 G A); (4469
10152467 A G); (4470 10152480 T C); (4471 10152513 C T); (4472 10152565 C G); (4473 10152652 A
G); (4474 10152728 A T); (4475 10152828 C T); (4476 10152991 T C); (4477 10153058 C G); (4478
10153163 G A); (4479 10153202 G A); (4480 10153554 A G); (4481 10153693 A G); (4482 10153766 G
T); (4483 10154058 T A); (4484 10154455 C G); (4485 10155043 GT G); (4486 10155154 C T); (4487
10155210 G A); (4488 10155337 C T); (4489 10155860 C T); (4490 10155991 G T); (4491 10156263 G
A); (4492 10156366 G A); (4493 10156469 G A); (4494 10156790 T C); (4495 10156794 G A); (4496
10157139 C G); (4497 10157183 T A); (4498 10157213 A G); (4499 10157256 T C); (4500 10157474 C
T); (4501 10158699 C G); (4502 10158834 C A); (4503 10160281 C CA); (4504 10161130 C T); (4505
10161401 T A); (4506 10161516 TTA T); (4507 10161976 A G); (4508 10161977 G A); (4509 10163392 C
T); (4510 10163449 T G); (4511 10163732 C A); (4512 10163763 A G); (4513 10164387 A G); (4514
10164451 G A); (4515 10164650 T C); (4516 10164802 G A); (4517 10165422 C G); (4518 10165518 T
A); (4519 10165646 G T); (4520 10165686 G A); (4521 10165731 T C); (4522 10165746 T C); (4523
10165941 G A); (4524 10166394 A G); (4525 10166509 T C); (4526 10166532 G A); (4527 10166559 A
G); (4528 10166603 A T); (4529 10166652 G A); (4530 10166764 A C); (4531 10166808 G A); (4532
10167393 T C); (4533 10167704 T G); (4534 10168012 G C); (4535 10168017 G GAC); (4536 10168928 C
T); (4537 10168939 A G); (4538 10169661 C A); (4539 10169949 G T); (4540 10170056 T A); (4541
10170348 C T); (4542 10170440 C A); (4543 10170632 C T); (4544 10170636 G A); (4545 10170807 G
A); (4546 10170829 G T); (4547 10170966 G A); (4548 10171056 T C); (4549 10171621 C T); (4550
10171686 T C); (4551 10172344 C T); (4552 10172463 G A); (4553 10172617 G C); (4554 10172755 C
T); (4555 10173128 A G); (4556 10173323 C A); (4557 10173333 A G); (4558 10173428 T C); (4559
10173530 T C); (4560 10173881 T C); (4561 10173927 C T); (4562 10174019 C T); (4563 10174182 G
A); (4564 10174393 G A); (4565 10174914 G A); (4566 10175148 C T); (4567 10175188 G A); (4568
10175389 A G); (4569 10175658 G A); (4570 10176092 G A); (4571 10176405 G A); (4572 10176700 C
T); (4573 10176892 A G); (4574 10176981 T C); (4575 10177025 G A); (4576 10177263 T TA); (4577
10177733 G A); (4578 10178559 T TA); (4579 10178624 T C); (4580 10179008 T A); (4581 10179662 A
G); (4582 10179678 A G); (4583 10179760 C T); (4584 10179839 C T); (4585 10179878 A G); (4586
10180791 A G); (4587 10181161 T C); (4588 10181445 A G); (4589 10181606 T C); (4590 10181613 A
G); (4591 10181762 G A); (4592 10181871 G A); (4593 10182458 T C); (4594 10182477 A G); (4595
10182785 C T); (4596 10183018 C T); (4597 10183032 A G); (4598 10183040 T C); (4599 10183049 A
G); (4600 10183114 T C); (4601 10183523 C A); (4602 10183573 A T); (4603 10183801 T C); (4604
10184392 T C); (4605 10184480 G A); (4606 10184482 G A); (4607 10184507 A G); (4608 10184608 A
C); (4609 10184615 G A); (4610 10184739 A G); (4611 10184771 G T); (4612 10184907 C T); (4613
10185299 T G); (4614 10185521 G A); (4615 10185632 T C); (4616 10186558 C T); (4617 10186638 A
G); (4618 10186835 C T); (4619 10187267 C T); (4620 10187389 C T); (4621 10187486 G A); (4622
10187620 G A); (4623 10189978 G A); (4624 10189991 G A); (4625 10190241 A T); (4626 10190242 T
A); (4627 10191345 C T); (4628 10191590 C T); (4629 10191591 G A); (4630 10191967 C T); (4631
10192024 A T); (4632 10192616 GA G); (4633 10192793 C A); (4634 10193482 G A); (4635 10193819 A
G); (4636 10193886 G A); (4637 10194041 C T); (4638 10194063 C A); (4639 10195420 A T); (4640
10195421 T A); (4641 10195422 A T); (4642 10195423 T A); (4643 10195424 A T); (4644 10195824 A
T); (4645 10196747 G A); (4646 10196877 C T); (4647 10197525 A C); (4648 10199690 G A); (4649
10201121 A C); (4650 10201796 A G); (4651 10202303 C T); (4652 10202347 A G); (4653 10202410 G
A); (4654 10202460 C T); (4655 10202691 G A); (4656 10203192 A G); (4657 10203197 A T); (4658
10204559 AT A); (4659 10206662 C T); (4660 10206916 A G); (4661 10207533 A T); (4662 10208612 G
C); (4663 10208756 C T); (4664 10208958 TC T); (4665 10209350 A G); (4666 10209732 G A); (4667
10210282 G A); (4668 10210311 A T); (4669 10210839 T G); (4670 10211301 C A); (4671 10211464 T
C); (4672 10211505 T C); (4673 10211679 T C); (4674 10211813 G A); (4675 10212095 A C); (4676
10212244 A C); (4677 10212292 T C); (4678 10212654 T C); (4679 10212663 T C); (4680 10212675 C
G); (4681 10212839 G A); (4682 10212902 G A); (4683 10213001 C T); (4684 10213452 A G); (4685
10213971 C T); (4686 10213991 G A); (4687 10213993 T C); (4688 10214017 A G); (4689 10214145 G
A); (4690 10214619 T C); (4691 10214828 C T); (4692 10214884 C T); (4693 10215839 GGAC G); (4694
10216119 A T); (4695 10216387 C T); (4696 10216689 A G); (4697 10216713 C G); (4698 10217630 C
CTTTCA); (4699 10217871 G A); (4700 10217913 G A); (4701 10218116 G A); (4702 10218447 A G); (4703
10218997 C T); (4704 10219191 T G); (4705 10219250 A C); (4706 10219311 G C); (4707 10219869 C
T); (4708 10220010 T C); (4709 10220021 G A); (4710 10220119 G A); (4711 10220632 T C); (4712
10220874 T C); (4713 10221022 C T); (4714 10221938 G A); (4715 10222445 A G); (4716 10222622 G
C); (4717 10222632 A G); (4718 10222932 T C); (4719 10223175 G A); (4720 10223835 G A); (4721
10223873 A G); (4722 10224088 C T); (4723 10224105 C T); (4724 10224283 G A); (4725 10224473 G
T); (4726 10224594 T C); (4727 10224799 G A); (4728 10225256 T C); (4729 10226166 A T); (4730
10226301 T G); (4731 10226317 G A); (4732 10226460 T G); (4733 10226500 A G); (4734 10226639 A
T); (4735 10226686 A G); (4736 10226872 A G); (4737 10226885 C A); (4738 10227031 A C); (4739
10228234 G C); (4740 10228458 A T); (4741 10228794 A T); (4742 10228971 C T); (4743 10229034 G
C); (4744 10229292 T A); (4745 10229661 C G); (4746 10230033 G A); (4747 10230302 G A); (4748
10231101 A G); (4749 10231246 A G); (4750 10231251 A G); (4751 10231296 T C); (4752 10231884 T
TG); (4753 10231950 C T); (4754 10232337 C T); (4755 10232592 G C); (4756 10232717 T C); (4757
10232783 A G); (4758 10232905 A T); (4759 10232996 T C); (4760 10233286 C T); (4761 10233743 C
T); (4762 10234047 T C); (4763 10234122 T G); (4764 10234154 T C); (4765 10234252 C T); (4766
10234954 T A); (4767 10235263 T C); (4768 10235385 A G); (4769 10235468 A G); (4770 10235485 T
A); (4771 10235612 C T); (4772 10235735 A G); (4773 10236264 T C); (4774 10236606 G A); (4775
10236911 T C); (4776 10236980 C A); (4777 10237209 A G); (4778 10237479 G A); (4779 10238174 C
A); (4780 10238270 T C); (4781 10238334 G A); (4782 10238343 A G); (4783 10238646 C T); (4784
10238916 A C); (4785 10238925 T A); (4786 10239038 A G); (4787 10239047 T C); (4788 10239065 T
C); (4789 10239362 C T); (4790 10240464 T C); (4791 10240492 A C); (4792 10241240 T C); (4793
10241449 A C); (4794 10241527 C T); (4795 10242449 A G); (4796 10242460 C T); (4797 10242651 A
G); (4798 10242959 C T); (4799 10243058 T C); (4800 10243170 G C); (4801 10243470 T
TTTACCCTTCGTGACGCAACATGACTGCTGG); (4802 10243702 G A); (4803 10244463 G A); (4804
10244743 CA C); (4805 10245039 T C); (4806 10245205 A C); (4807 10245451 C A); (4808 10245555 T
C); (4809 10245600 G T); (4810 10245896 G T); (4811 10245943 T C); (4812 10245981 G A); (4813
10246049 G A); (4814 10246092 G A); (4815 10246484 G A); (4816 10246577 T TA); (4817 10246764 A
G); (4818 10246792 A AATT); (4819 10247356 G A); (4820 10247617 T C); (4821 10247703 A G); (4822
10247713 G A); (4823 10247740 A G); (4824 10247745 A G); (4825 10247783 T C); (4826 10247813 A
G); (4827 10247864 T C); (4828 10247889 A G); (4829 10247956 G A); (4830 10247979 G A); (4831
10248291 G A); (4832 10248427 G A); (4833 10248446 T C); (4834 10248462 G A); (4835 10248505 T
C); (4836 10248729 A G); (4837 10248751 G A); (4838 10248755 G A); (4839 10248850 C T); (4840
10249002 G A); (4841 10249288 G A); (4842 10249845 T C); (4843 10249898 G A); (4844 10249983 A
G); (4845 10250066 A G); (4846 10250113 T C); (4847 10250137 G A); (4848 10250487 C T); (4849
10250503 C T); (4850 10250526 C T); (4851 10250864 A C); (4852 10250878 G T); (4853 10251014 C
T); (4854 10251050 A G); (4855 10251075 C T); (4856 10251125 G A); (4857 10251280 C T); (4858
10251423 C T); (4859 10251470 C G); (4860 10251650 T C); (4861 10251671 C T); (4862 10251678 T
A); (4863 10251695 A G); (4864 10251846 T C); (4865 10251984 G T); (4866 10252005 C T); (4867
10252319 G A); (4868 10252689 A T); (4869 10253120 TA T); (4870 10253315 A AT); (4871 10254004 C
T); (4872 10254134 A T); (4873 10254338 G A); (4874 10255731 TGCAGTG T); (4875 10257126 G
A); (4876 10257736 A G); (4877 10257894 A C); (4878 10258129 T C); (4879 10258178 C T); (4880
10258312 A G); (4881 10258338 G A); (4882 10258605 G A); (4883 10258710 A G); (4884 10258729 G
A); (4885 10259128 C T); (4886 10259199 G A); (4887 10259559 C T); (4888 10259578 T C); (4889
10259740 A C); (4890 10259861 G A); (4891 10259967 A G); (4892 10260044 T C); (4893 10260146 A
G); (4894 10260288 A G); (4895 10260325 A G); (4896 10260464 A C); (4897 10260936 A G); (4898
10260956 A C); (4899 10261237 A T); (4900 10261736 A T); (4901 10261775 A G); (4902 10262132 T
C); (4903 10262570 A G); (4904 10262796 T C); (4905 10262854 G A); (4906 10263140 A T); (4907
10263275 A G); (4908 10263860 G A); (4909 10264058 G A); (4910 10264061 T C); (4911 10264911 AT
A); (4912 10265151 A G); (4913 10265202 A G); (4914 10265321 G T); (4915 10265322 C T); (4916
10265345 A G); (4917 10265421 G T); (4918 10265484 G A); (4919 10265526 T C); (4920 10265781 C
G); (4921 10266444 A G); (4922 10267044 T C); (4923 10267764 A G); (4924 10268586 C A); (4925
10268696 T C); (4926 10268813 C T); (4927 10268872 G A); (4928 10269069 A G); (4929 10269233 G
A); (4930 10269303 G A); (4931 10269393 A G); (4932 10269434 A G); (4933 10269499 T G); (4934
10269500 C A); (4935 10269604 T C); (4936 10269803 T G); (4937 10269977 T C); (4938 10269998 T
C); (4939 10270115 G A); (4940 10270527 C T); (4941 10271114 A C); (4942 10272009 A G); (4943
10272577 G A); (4944 10273267 C G); (4945 10273584 T A); (4946 10273595 C T); (4947 10273918 C
T); (4948 10274272 G T); (4949 10274564 T A); (4950 10274970 A G); (4951 10275265 C T); (4952
10275554 A G); (4953 10275803 T C); (4954 10279164 A G); (4955 10279311 A G); (4956 10279561 A
C); (4957 10279573 G A); (4958 10279645 G T); (4959 10279871 T G); (4960 10279888 A G); (4961
10280435 A G); (4962 10280535 A T); (4963 10280613 C G); (4964 10281336 G A); (4965 10281338 T
A); (4966 10281910 T C); (4967 10281934 T C); (4968 10282414 A T); (4969 10282419 C T); (4970
10282502 A G); (4971 10282699 T C); (4972 10282896 C A); (4973 10283100 C G); (4974 10284403 C
T); (4975 10284502 C T); (4976 10285123 T C); (4977 10285184 G T); (4978 10285513 A T); (4979
10285861 C T); (4980 10285863 G C); (4981 10286276 A AG); (4982 10286576 T C); (4983 10287194 C
G); (4984 10287211 C T); (4985 10287282 A C); (4986 10287408 A C); (4987 10287586 A T); (4988
10287794 T A); (4989 10287862 C T); (4990 10289640 T C); (4991 10289809 T C); (4992 10289924 G
T); (4993 10290427 C T); (4994 10290622 A C); (4995 10290623 T G); (4996 10290625 A T); (4997
10290626 T C); (4998 10290627 C A); (4999 10290628 A T); (5000 10290797 C G); (5001 10290951 T
A); (5002 10291473 T C); (5003 10291656 C T); (5004 10291762 C G); (5005 10291979 C T); (5006
10292046 G A); (5007 10292071 C G); (5008 10292347 T C); (5009 10292441 C T); (5010 10292542 A
G); (5011 10292586 A G); (5012 10292842 T C); (5013 10293076 G A); (5014 10293117 T C); (5015
10293211 T C); (5016 10293951 T C); (5017 10294218 A G); (5018 10294277 C T); (5019 10294288 C
T); (5020 10295046 G A); (5021 10295117 A AG); (5022 10295234 T C); (5023 10295456 C T); (5024
10295495 C G); (5025 10295780 G A); (5026 10295806 A G); (5027 10295917 A G); (5028 10296086 T
C); (5029 10296234 G A); (5030 10296304 G T); (5031 10297780 A G); (5032 10297999 G A); (5033
10298351 C G); (5034 10298406 A AG); (5035 10298421 G A); (5036 10298423 T C); (5037 10298531 G
A); (5038 10298775 G T); (5039 10299022 T C); (5040 10299031 A G); (5041 10299154 A G); (5042
10299461 T G); (5043 10299633 G A); (5044 10299799 G A); (5045 10299892 C T); (5046 10300015 T
C); (5047 10300384 T C); (5048 10300568 C T); (5049 10300576 G A); (5050 10300693 A G); (5051
10300853 G A); (5052 10301201 A G); (5053 10301295 T C); (5054 10301761 G A); (5055 10301786 G
A); (5056 10301800 C T); (5057 10301944 C T); (5058 10302115 T C); (5059 10302427 G A); (5060
10302794 C T); (5061 10302992 G C); (5062 10303704 T C); (5063 10303761 A C); (5064 10303830 G
A); (5065 10303921 A T); (5066 10304143 G A); (5067 10305092 A G); (5068 10305380 A T); (5069
10305628 G T); (5070 10306541 T A); (5071 10307463 G A); (5072 10307804 T C); (5073 10307915 G
A); (5074 10308027 C G); (5075 10308227 A T); (5076 10308253 T C); (5077 10309238 T TA); (5078
10309583 GA G); (5079 10309672 T A); (5080 10310245 G T); (5081 10310610 A G); (5082 10310997 C
G); (5083 10311350 AT A); (5084 10311493 A G); (5085 10311684 G A); (5086 10311861 C T); (5087
10312227 A G); (5088 10312231 G C); (5089 10312484 C G); (5090 10312485 A G); (5091 10312488 T
C); (5092 10312654 T A); (5093 10312670 A G); (5094 10312872 C T); (5095 10312887 T C); (5096
10312973 C T); (5097 10313264 T C); (5098 10313534 C T); (5099 10313639 T C); (5100 10314042 C
T); (5101 10314079 C T); (5102 10314085 T C); (5103 10314147 C T); (5104 10314165 C T); (5105
10314208 G A); (5106 10314311 C G); (5107 10314393 C T); (5108 10315025 C T); (5109 10315028 G
A); (5110 10315079 C T); (5111 10315378 T C); (5112 10315877 A G); (5113 10315978 G A); (5114
10316464 C T); (5115 10316487 G A); (5116 10316656 T A); (5117 10316947 T C); (5118 10317083 G
A); (5119 10317338 C T); (5120 10317351 C T); (5121 10317352 C T); (5122 10317566 T C); (5123
10317642 C T); (5124 10317650 T C); (5125 10317669 C A); (5126 10317707 C T); (5127 10318017 C
T); (5128 10318262 A G); (5129 10318478 C T); (5130 10318609 T C); (5131 10318879 T A); (5132
10318926 G T); (5133 10319167 G A); (5134 10319254 ATGCTG A); (5135 10319502 T C); (5136
10319555 A G); (5137 10319594 C G); (5138 10319714 G A); (5139 10319944 C T); (5140 10319993 C
A); (5141 10320527 G C); (5142 10320713 C T); (5143 10320733 GA G); (5144 10320742 G A); (5145
10320753 C T); (5146 10321858 T G); (5147 10321963 C CTG); (5148 10322852 G A); (5149 10322993 T
C); (5150 10323123 G A); (5151 10323338 GT G); (5152 10324953 G C); (5153 10325415 T A); (5154
10326140 G A); (5155 10326182 C T); (5156 10326569 T C); (5157 10326745 T C); (5158 10327149 G
T); (5159 10327309 A G); (5160 10327535 G A); (5161 10328589 G A); (5162 10328623 T G); (5163
10328697 T G); (5164 10328995 C T); (5165 10329163 A G); (5166 10329198 G A); (5167 10330889 C
T); (5168 10331027 G A); (5169 10331056 A C); (5170 10331058 C T); (5171 10331201 T C); (5172
10331294 A C); (5173 10332122 C T); (5174 10332763 C A); (5175 10333404 G T); (5176 10333880 G
T); (5177 10334190 T C); (5178 10334417 C T); (5179 10334697 A G); (5180 10335245 C A); (5181
10335343 G A); (5182 10335496 C T); (5183 10335866 A G); (5184 10336011 G A); (5185 10336113 C
T); (5186 10336128 A G); (5187 10336227 C G); (5188 10336240 T TTTCACAAGAAAACCGA); (5189
10336317 T A); (5190 10336386 C T); (5191 10336410 G A); (5192 10336880 C T); (5193 10337396 C
T); (5194 10337445 A G); (5195 10337479 A G); (5196 10337510 C T); (5197 10338579 A G); (5198
10338994 T C); (5199 10339284 G A); (5200 10342374 G A); (5201 10342603 G A); (5202 10342691 TA
T); (5203 10343130 A G); (5204 10343503 TA T); (5205 10343888 A T); (5206 10343910 C T); (5207
10344109 T C); (5208 10344160 C A); (5209 10344458 C A); (5210 10344595 T G); (5211 10344612 A
G); (5212 10346041 A G); (5213 10346050 T C); (5214 10347073 C T); (5215 10347881 G T); (5216
10348101 A G); (5217 10348833 GTTAAAT G); (5218 10349070 T C); (5219 10349467 G A); (5220
10350611 C T); (5221 10351916 C T); (5222 10352123 C T); (5223 10352168 C A); (5224 10353985 G
A); (5225 10354202 C T); (5226 10354702 T G); (5227 10355093 A AT); (5228 10356845 A AT); (5229
10357218 C T); (5230 10358135 T TA); (5231 10358485 TA T); (5232 10359153 GA G); (5233 10360041 C
A); (5234 10360149 G A); (5235 10361243 T C); (5236 10361391 G A); (5237 10361625 C T); (5238
10362127 T C); (5239 10362167 A G); (5240 10363298 C A); (5241 10363626 T C); (5242 10364141 A
T); (5243 10364197 C A); (5244 10364311 T A); (5245 10364312 T A); (5246 10364322 T C); (5247
10364350 A AT); (5248 10364668 G A); (5249 10364676 G A); (5250 10364742 T A); (5251 10364974 C
T); (5252 10365115 C T); (5253 10365128 C T); (5254 10365131 G A); (5255 10365325 C T); (5256
10365379 G A); (5257 10365424 GA G); (5258 10365666 GA G); (5259 10365840 A C); (5260 10366004 G
GT); (5261 10366053 T C); (5262 10367812 A C); (5263 10368032 G A); (5264 10368392 G A); (5265
10368506 G A); (5266 10368583 A AT); (5267 10369072 A G); (5268 10369098 A G); (5269 10369457 G
T); (5270 10370978 C T); (5271 10371272 G C); (5272 10371311 T G); (5273 10371485 C T); (5274
10371524 G A); (5275 10371781 A G); (5276 10372050 A G); (5277 10372421 T G); (5278 10372461 A
AGGAGTTATTTGAGGACAC); (5279 10372919 C T); (5280 10373031 T G); (5281 10373032 C T); (5282
10373220 C T); (5283 10374192 GA G); (5284 10374405 T C); (5285 10374576 T C); (5286 10374706 T
A); (5287 10374788 T A); (5288 10374888 A G); (5289 10375220 G A); (5290 10375330 T C); (5291
10375402 G A); (5292 10375417 A C); (5293 10375468 A G); (5294 10375560 C T); (5295 10375582 A
G); (5296 10375954 A G); (5297 10376188 G A); (5298 10376431 T C); (5299 10376754 T C); (5300
10377099 G A); (5301 10377595 G A); (5302 10377616 T C); (5303 10377840 G A); (5304 10377928 G
A); (5305 10378295 T C); (5306 10378583 C A); (5307 10378803 G A); (5308 10379161 T C); (5309
10379280 A G); (5310 10379892 A G); (5311 10380020 G T); (5312 10380698 T A); (5313 10380788 T
C); (5314 10380839 AAG A); (5315 10380994 A C); (5316 10381347 G A); (5317 10381872 C T); (5318
10382196 T C); (5319 10382493 G A); (5320 10382836 G A); (5321 10383453 C T); (5322 10383977 C
G); (5323 10384115 A C); (5324 10384263 A G); (5325 10384532 T C); (5326 10384662 G A); (5327
10385399 C A); (5328 10385629 C G); (5329 10385843 G C); (5330 10387102 T G); (5331 10387217 C
T); (5332 10387263 C T); (5333 10387294 G T); (5334 10388244 T G); (5335 10388520 G A); (5336
10388676 C T); (5337 10389126 G T); (5338 10389634 A C); (5339 10389697 G A); (5340 10390032 C
T); (5341 10390311 G T); (5342 10390667 G C); (5343 10390754 C A); (5344 10390928 T A); (5345
10391173 A G); (5346 10391280 C A); (5347 10391624 AAC A); (5348 10391631 T A); (5349 10391638 T
C); (5350 10391848 C A); (5351 10391871 A G); (5352 10392671 C A); (5353 10393129 T C); (5354
10393413 G A); (5355 10393487 G C); (5356 10393607 A AC); (5357 10394180 G A); (5358 10394232 T
C); (5359 10394345 A G); (5360 10394380 T C); (5361 10394437 A G); (5362 10394675 G A); (5363
10394960 C T); (5364 10394968 A G); (5365 10395267 G A); (5366 10395290 AT A); (5367 10395294 A
C); (5368 10395310 A G); (5369 10395762 A T); (5370 10395940 G A); (5371 10396309 T C); (5372
10396645 T C); (5373 10397032 T C); (5374 10397342 G C); (5375 10397482 A C); (5376 10397512 G
A); (5377 10397625 G A); (5378 10397665 G T); (5379 10397690 A G); (5380 10397748 C G); (5381
10397897 G A); (5382 10397999 C T); (5383 10398415 T C); (5384 10398643 G C); (5385 10398791 C
T); (5386 10398816 A G); (5387 10398936 C T); (5388 10399828 C T); (5389 10400052 G A); (5390
10400677 T C); (5391 10400701 G T); (5392 10400987 A G); (5393 10401097 T TG); (5394 10401629 G
T); (5395 10401826 G A); (5396 10401897 G A); (5397 10402436 C T); (5398 10403500 T G); (5399
10403569 T C); (5400 10403763 C G); (5401 10403788 C T); (5402 10403928 C T); (5403 10404071 G
A); (5404 10404295 G T); (5405 10404469 A G); (5406 10404593 G A); (5407 10404616 A C); (5408
10404660 G A); (5409 10404898 C A); (5410 10405778 C T); (5411 10406102 T C); (5412 10406205 C
T); (5413 10406729 T A); (5414 10407293 G C); (5415 10407504 T A); (5416 10409726 C T); (5417
10410655 T G); (5418 10410790 C T); (5419 10410888 T G); (5420 10411569 C A); (5421 10411608 C
T); (5422 10411759 G A); (5423 10411761 G A); (5424 10412210 G T); (5425 10412326 G A); (5426
10412638 A G); (5427 10412704 G A); (5428 10413014 C T); (5429 10413236 G A); (5430 10413926 C
T); (5431 10414928 C T); (5432 10415313 T C); (5433 10415499 A C); (5434 10415651 T C); (5435
10415707 G A); (5436 10415740 C T); (5437 10416252 T C); (5438 10416343 C T); (5439 10416473 G
A); (5440 10416526 A T); (5441 10416556 A G); (5442 10416695 T TAAATTTC); (5443 10416768 G
A); (5444 10417459 T C); (5445 10418045 C T); (5446 10418120 G A); (5447 10418514 G A); (5448
10418716 T G); (5449 10418730 G A); (5450 10419687 A C); (5451 10420010 G A); (5452 10420121 T
G); (5453 10421182 T G); (5454 10421188 C T); (5455 10421219 G A); (5456 10421229 T A); (5457
10421289 C T); (5458 10421292 G T); (5459 10421328 T C); (5460 10421390 G A); (5461 10421404 C
T); (5462 10421409 G A); (5463 10421424 T C); (5464 10421568 C T); (5465 10421599 C T); (5466
10421860 G T); (5467 10422004 G A); (5468 10422521 C T); (5469 10422613 C T); (5470 10422902 A
G); (5471 10422994 G A); (5472 10423405 T G); (5473 10423658 G T); (5474 10423687 G A); (5475
10423857 T C); (5476 10424291 T C); (5477 10424868 C G); (5478 10424996 C T); (5479 10425223 A
G); (5480 10425270 C T); (5481 10425701 T A); (5482 10425742 AAAT A); (5483 10425830 G T); (5484
10426081 G A); (5485 10426095 GA G); (5486 10426376 C A); (5487 10426730 C T); (5488 10426958 C
A); (5489 10426989 G A); (5490 10428005 C T); (5491 10428404 A G); (5492 10428458 C T); (5493
10429438 T A); (5494 10429565 A G); (5495 10429648 C T); (5496 10429668 C T); (5497 10429821 T
A); (5498 10436117 C A); (5499 10436122 C G); (5500 10436647 A C); (5501 10437057 T G); (5502
10437179 T C); (5503 10437341 C A); (5504 10437489 C G); (5505 10438180 T C); (5506 10438253 A
AGCATGAATTGCATGAT); (5507 10438445 A G); (5508 10438462 T C); (5509 10439146 C G); (5510
10439167 T C); (5511 10439272 G T); (5512 10439437 C T); (5513 10439780 A G); (5514 10440013 C
T); (5515 10440369 A G); (5516 10440635 T G); (5517 10440736 A G); (5518 10441089 A T); (5519
10441091 G C); (5520 10441092 T G); (5521 10441384 A G); (5522 10441446 C T); (5523 10441575 G
T); (5524 10441693 T A); (5525 10441726 G A); (5526 10441836 C T); (5527 10441900 G A); (5528
10441926 C T); (5529 10442094 T C); (5530 10442095 T C); (5531 10442099 C T); (5532 10442100 G
A); (5533 10442142 A G); (5534 10442154 C T); (5535 10442163 T C); (5536 10442208 A G); (5537
10442390 C A); (5538 10442424 A AATAGAGGTTCC); (5539 10442567 C T); (5540 10442583 C T); (5541
10442598 G A); (5542 10443259 G A); (5543 10443403 A C); (5544 10443576 T C); (5545 10443741 T
C); (5546 10443927 G A); (5547 10444271 C T); (5548 10444380 A G); (5549 10444610 G A); (5550
10444935 T G); (5551 10446480 A C); (5552 10446481 G A); (5553 10446709 G A); (5554 10446722 G
A); (5555 10447036 G A); (5556 10447064 C T); (5557 10447327 T C); (5558 10447800 A G); (5559
10447872 T C); (5560 10447954 G T); (5561 10447963 G T); (5562 10448079 C T); (5563 10448209 G
A); (5564 10448277 G A); (5565 10448314 T C); (5566 10448534 G A); (5567 10448697 C T); (5568
10448710 C A); (5569 10448842 G A); (5570 10448854 G A); (5571 10449022 C T); (5572 10449105 A
G); (5573 10449114 T C); (5574 10449154 G A); (5575 10449171 G A); (5576 10449318 T C); (5577
10449491 G A); (5578 10449587 C CA); (5579 10449777 G A); (5580 10449993 T C); (5581 10450005 T
C); (5582 10450781 C T); (5583 10450805 C G); (5584 10450957 A G); (5585 10451093 G A); (5586
10451103 A G); (5587 10451230 A C); (5588 10451247 G A); (5589 10451332 A T); (5590 10451605 A
G); (5591 10451987 A C); (5592 10452166 T A); (5593 10452273 C A); (5594 10452308 G A); (5595
10452392 C T); (5596 10452454 C A); (5597 10454954 A G); (5598 10455720 G A); (5599 10456109 G
T); (5600 10456190 A G); (5601 10457553 C A); (5602 10457559 T C); (5603 10457655 A G); (5604
10458084 A C); (5605 10458451 G T); (5606 10458452 C T); (5607 10458783 T C); (5608 10458843 C
T); (5609 10458936 T C); (5610 10458948 A G); (5611 10458949 C T); (5612 10459140 T C); (5613
10459174 C A); (5614 10463733 A G); (5615 10463781 C T); (5616 10463819 T C); (5617 10465197 A
G); (5618 10465283 C T); (5619 10465842 G A); (5620 10465845 C T); (5621 10466063 C T); (5622
10466270 C T); (5623 10466557 G GGAAAAAGAAAATGAATGT); (5624 10466661 C T); (5625 10466865 G
GCAGGTCCTCTTAATTCTTTTT); (5626 10467040 C T); (5627 10467156 T C); (5628 10467260 A G); (5629
10467348 C T); (5630 10467828 T C); (5631 10467896 A G); (5632 10467900 C T); (5633 10468301 C
T); (5634 10468387 T G); (5635 10468435 C CTT); (5636 10468895 TTGTAA T); (5637 10468983 A
G); (5638 10469581 A C); (5639 10470037 T C); (5640 10470070 T C); (5641 10470473 A G); (5642
10470562 C A); (5643 10471133 T A); (5644 10471158 G A); (5645 10472286 G T); (5646 10472475 A
T); (5647 10473111 G T); (5648 10473114 T C); (5649 10473852 T C); (5650 10474643 T G); (5651
10475559 A T); (5652 10475711 T C); (5653 10475724 C T); (5654 10475878 C T); (5655 10475982 G
A); (5656 10476522 G A); (5657 10476624 T G); (5658 10476796 G A); (5659 10476872 T C); (5660
10477120 G A); (5661 10477168 T C); (5662 10477382 G A); (5663 10477468 G A); (5664 10477682 G
A); (5665 10477729 A T); (5666 10477881 G A); (5667 10477974 A G); (5668 10477991 G A); (5669
10478186 C A); (5670 10478230 A G); (5671 10478390 A G); (5672 10478470 G T); (5673 10478514 G
A); (5674 10478524 G A); (5675 10478526 G A); (5676 10478812 C T); (5677 10479055 C T); (5678
10479111 G A); (5679 10479285 C T); (5680 10479404 G A); (5681 10479453 C T); (5682 10479666 C
T); (5683 10479690 T C); (5684 10479696 G A); (5685 10479697 A G); (5686 10479796 C T); (5687
10480301 T C); (5688 10480373 A AT); (5689 10481187 A G); (5690 10481212 C T); (5691 10481254 G
A); (5692 10481366 A G); (5693 10481460 C T); (5694 10481902 C A); (5695 10481987 C T); (5696
10482118 T G); (5697 10482252 C T); (5698 10482259 G A); (5699 10482665 C T); (5700 10482789 A
G); (5701 10482978 G T); (5702 10483376 G A); (5703 10483441 T G); (5704 10483558 G A); (5705
10483765 G A); (5706 10483807 G T); (5707 10484074 G A); (5708 10484153 G A); (5709 10484270 C
G); (5710 10484633 C T); (5711 10484953 G A); (5712 10486189 G A); (5713 10486490 A G); (5714
10486817 A G); (5715 10487176 A C); (5716 10487638 CAT C); (5717 10488243 A G); (5718 10488249
GA G); (5719 10488359 G A); (5720 10488829 A T); (5721 10488876 G A); (5722 10489061 A G); (5723
10489084 G A); (5724 10489212 G A); (5725 10489215 G A); (5726 10489459 C T); (5727 10489920 C
G); (5728 10490478 G T); (5729 10490525 ATGATACTCTGTT A); (5730 10490779 A C); (5731 10491093 G
A); (5732 10491289 T C); (5733 10491525 T C); (5734 10491875 A G); (5735 10491986 G A); (5736
10492176 C T); (5737 10492269 C T); (5738 10492433 G A); (5739 10492690 T C); (5740 10493029 G
A); (5741 10493398 C T); (5742 10493656 C T); (5743 10493821 G A); (5744 10493872 A G); (5745
10494296 C T); (5746 10494546 C T); (5747 10495092 T C); (5748 10495358 A T); (5749 10495359 G
A); (5750 10495447 C A); (5751 10495456 C T); (5752 10495903 G T); (5753 10495950 G T); (5754
10496087 G A); (5755 10496268 G A); (5756 10496287 A G); (5757 10496629 A G); (5758 10496862 G
A); (5759 10497068 G A); (5760 10497103 G GATTGAAAACTGATTTTGAT); (5761 10497237 A G); (5762
10497281 C T); (5763 10497455 A T); (5764 10497796 C T); (5765 10498123 C T); (5766 10498373 C
A); (5767 10498456 ATG A); (5768 10499247 T C); (5769 10499270 A C); (5770 10499293 C T); (5771
10499673 T C); (5772 10499884 A G); (5773 10499885 G A); (5774 10500050 C T); (5775 10500713 G
C); (5776 10500745 C T); (5777 10501040 G C); (5778 10501269 G A); (5779 10501547 C T); (5780
10501627 C T); (5781 10501872 T A); (5782 10502028 C T); (5783 10502137 T C); (5784 10502481 C
T); (5785 10502512 A G); (5786 10502513 C A); (5787 10502625 T C); (5788 10502707 C A); (5789
10502771 G A); (5790 10503047 G A); (5791 10503620 G A); (5792 10504017 T A); (5793 10504200 G
A); (5794 10504222 G A); (5795 10504231 G A); (5796 10504293 A C); (5797 10504301 T A); (5798
10504426 C A); (5799 10504442 T C); (5800 10504749 T C); (5801 10504820 T C); (5802 10504937 T
A); (5803 10504992 A G); (5804 10505004 A C); (5805 10505042 G A); (5806 10505201 T C); (5807
10506427 G A); (5808 10506699 G A); (5809 10507244 A G); (5810 10507780 C T); (5811 10507791 G
T); (5812 10507819 C G); (5813 10507844 T G); (5814 10508008 G A); (5815 10508067 G C); (5816
10508255 C A); (5817 10508275 A G); (5818 10508366 G A); (5819 10508395 T C); (5820 10508457 C
G); (5821 10508680 T C); (5822 10509643 A G); (5823 10510178 A C); (5824 10510846 G A); (5825
10510969 A C); (5826 10511155 G A); (5827 10511468 A G); (5828 10511637 T C); (5829 10511745 C
T); (5830 10511886 C A); (5831 10512256 C T); (5832 10512521 A G); (5833 10512583 TC T); (5834
10513134 G A); (5835 10513240 G A); (5836 10513642 A T); (5837 10513646 G A); (5838 10513999 C
T); (5839 10514198 C T); (5840 10514341 G A); (5841 10514790 A G); (5842 10515074 T G); (5843
10515284 C T); (5844 10515287 C T); (5845 10515426 C T); (5846 10515692 C T); (5847 10516070 T
C); (5848 10516281 C T); (5849 10516368 C CT); (5850 10516592 G A); (5851 10517560 C A); (5852
10517884 C A); (5853 10518001 G C); (5854 10518011 C T); (5855 10518022 G A); (5856 10518270 G
T); (5857 10518271 T C); (5858 10518297 A G); (5859 10518418 A G); (5860 10518489 C A); (5861
10518627 T C); (5862 10518723 A T); (5863 10518934 G A); (5864 10519018 C A); (5865 10519019 A
C); (5866 10519022 C A); (5867 10519023 G C); (5868 10519027 A G); (5869 10519028 T A); (5870
10519029 A T); (5871 10519231 C T); (5872 10519547 A T); (5873 10519600 A G); (5874 10519643 A
G); (5875 10519852 T G); (5876 10520090 T C); (5877 10520101 T C); (5878 10520151 G
GAAATACACTA); (5879 10521446 C A); (5880 10522081 T C); (5881 10522637 A T); (5882 10523414 A
C); (5883 10523561 C A); (5884 10523610 C T); (5885 10523707 C T); (5886 10523747 C T); (5887
10523863 C G); (5888 10523930 C G); (5889 10524909 C A); (5890 10525204 G A); (5891 10525361 A
G); (5892 10525602 G T); (5893 10525644 A G); (5894 10525867 A C); (5895 10525939 T G); (5896
10525985 G A); (5897 10526041 G T); (5898 10526057 A G); (5899 10526163 G A); (5900 10526497 G
A); (5901 10526507 A G); (5902 10526655 G T); (5903 10526776 A G); (5904 10527260 C T); (5905
10527280 A G); (5906 10527378 A T); (5907 10527788 T C); (5908 10528202 C T); (5909 10528440 C
CAA); (5910 10528521 A C); (5911 10528839 C T); (5912 10529130 C T); (5913 10529317 T C); (5914
10529364 C T); (5915 10529598 A G); (5916 10529626 A G); (5917 10529761 C T); (5918 10529971 T
C); (5919 10530373 A T); (5920 10530383 C A); (5921 10530605 T C); (5922 10530610 G C); (5923
10531315 AT A); (5924 10531424 T C); (5925 10531538 C T); (5926 10531874 T C); (5927 10532056 C
T); (5928 10532205 G A); (5929 10532446 C T); (5930 10532696 A G); (5931 10533092 A G); (5932
10533153 T C); (5933 10533220 T A); (5934 10533256 A G); (5935 10533384 G A); (5936 10533523 A
G); (5937 10533738 T G); (5938 10533772 G A); (5939 10534105 A G); (5940 10534275 G A); (5941
10534513 C T); (5942 10534568 T C); (5943 10535513 C G); (5944 10535678 T C); (5945 10535922 A
G); (5946 10536595 C T); (5947 10536638 T A); (5948 10536639 G A); (5949 10536755 A G); (5950
10537062 T A); (5951 10537450 G A); (5952 10537456 C T); (5953 10537503 T G); (5954 10537878 G
A); (5955 10537913 G A); (5956 10538294 GA G); (5957 10538419 G A); (5958 10538693 C T); (5959
10538869 T C); (5960 10538937 G C); (5961 10539045 G A); (5962 10539234 C G); (5963 10539329 A
T); (5964 10539442 A G); (5965 10539450 C A); (5966 10539519 A G); (5967 10539806 T C); (5968
10539846 A G); (5969 10540128 T C); (5970 10540129 C A); (5971 10540216 A G); (5972 10540264 T
C); (5973 10540288 G A); (5974 10540300 C T); (5975 10540599 A G); (5976 10540723 T A); (5977
10540791 G A); (5978 10541577 GATTCTCTTAA G); (5979 10542374 T A); (5980 10543174 CTTTATTTA
C); (5981 10543524 T C); (5982 10543650 A G); (5983 10543884 C G); (5984 10548286 C T); (5985
10548332 C T); (5986 10548845 A T); (5987 10548863 A G); (5988 10548956 G A); (5989 10548957 C
T); (5990 10549299 T C); (5991 10549302 G A); (5992 10549500 T C); (5993 10549505 C T); (5994
10549509 T C); (5995 10549510 A T); (5996 10549608 C A); (5997 10549609 T C); (5998 10549736 C
A); (5999 10549745 T C); (6000 10549749 C T); (6001 10550231 G T); (6002 10550261 G A); (6003
10550267 G A); (6004 10550268 T A); (6005 10550270 C T); (6006 10550301 C T); (6007 10550306 C
T); (6008 10550308 A G); (6009 10550311 T C); (6010 10550315 A T); (6011 10550370 G A); (6012
10550404 A G); (6013 10550406 C T); (6014 10550426 A G); (6015 10550427 C T); (6016 10550531 C
T); (6017 10550766 T C); (6018 10550777 T C); (6019 10550783 A G); (6020 10550794 T C); (6021
10550797 G A); (6022 10550819 T C); (6023 10550851 CT C); (6024 10550881 A G); (6025 10551476 C
T); (6026 10551548 G A); (6027 10551590 G A); (6028 10551596 A G); (6029 10554594 C T); (6030
10560403 T G); (6031 10560462 T A); (6032 10560883 A G); (6033 10561098 A C); (6034 10561256 A
G); (6035 10562775 T C); (6036 10562851 G A); (6037 10562852 T C); (6038 10562917 A G); (6039
10563390 ATATTT A); (6040 10563625 A T); (6041 10564636 A T); (6042 10565407 T A); (6043 10565497
G A); (6044 10565508 G A); (6045 10565757 T C); (6046 10566534 TGGAAGAAGAACAAGCCTTATATA
T); (6047 10566758 C T); (6048 10568477 T G); (6049 10569240 A C); (6050 10569317 A AT); (6051
10570251 A T); (6052 10570278 A G); (6053 10570501 T C); (6054 10571704 A C); (6055 10571983 A
C); (6056 10572784 C A); (6057 10573716 T A); (6058 10573953 C T); (6059 10574009 T C); (6060
10574016 G A); (6061 10574059 ATT A); (6062 10574236 C T); (6063 10574247 G A); (6064 10574541 G
T); (6065 10574657 G A); (6066 10574677 C G); (6067 10574956 T C); (6068 10575782 A AT); (6069
10576768 C T); (6070 10576888 A T); (6071 10577093 T TGA); (6072 10577193 C T); (6073 10577275 G
T); (6074 10577417 C T); (6075 10577624 C T); (6076 10578062 C T); (6077 10578506 G A); (6078
10578872 G T); (6079 10578987 G T); (6080 10579114 A G); (6081 10579236 G A); (6082 10579331 G
T); (6083 10579425 G A); (6084 10579440 C A); (6085 10580226 G A); (6086 10580297 C T); (6087
10580752 A T); (6088 10580861 G A); (6089 10580918 A G); (6090 10581328 G A); (6091 10581414 C
T); (6092 10581490 G A); (6093 10581736 A G); (6094 10582071 G A); (6095 10582512 C T); (6096
10582517 G C); (6097 10582958 C G); (6098 10583112 TAA T); (6099 10583116 A G); (6100 10583473 A
C); (6101 10584044 C T); (6102 10584137 G A); (6103 10584154 ATCAATTTT A); (6104 10584306 G
A); (6105 10584475 C T); (6106 10585096 C T); (6107 10585267 C A); (6108 10585756 T C); (6109
10585935 A G); (6110 10585958 C T); (6111 10585991 C T); (6112 10586030 A G); (6113 10586468 T
C); (6114 10586732 C A); (6115 10586828 T C); (6116 10587236 GA G); (6117 10588426 T A); (6118
10588442 AT A); (6119 10588541 G GAA); (6120 10588918 GA G); (6121 10589460 G C); (6122
10589477 A AT); (6123 10589527 A ACCCTTCTTTAATTTCCATG); (6124 10590143 AAGGAT A); (6125
10590885 T TA); (6126 10591073 T C); (6127 10591124 G A); (6128 10591138 G A); (6129 10591379 T
G); (6130 10591439 T C); (6131 10591449 C T); (6132 10591668 C T); (6133 10591680 G A); (6134
10591899 A AAT); (6135 10592130 A G); (6136 10592411 G A); (6137 10592719 T C); (6138 10593392 T
C); (6139 10593402 G A); (6140 10593470 C A); (6141 10593541 A G); (6142 10593698 TG T); (6143
10593779 T C); (6144 10594094 T C); (6145 10594120 C T); (6146 10594186 C T); (6147 10594277 G
A); (6148 10594328 G A); (6149 10594586 A G); (6150 10594813 A G); (6151 10594926 T C); (6152
10594938 G A); (6153 10595208 C T); (6154 10595438 G A); (6155 10595613 G A); (6156 10595959 G
A); (6157 10596856 T G); (6158 10597000 G A); (6159 10597198 A G); (6160 10597817 C T); (6161
10597873 C T); (6162 10597919 T C); (6163 10598033 T A); (6164 10598144 T C); (6165 10598178 A
G); (6166 10598204 A G); (6167 10598417 G C); (6168 10598442 G A); (6169 10598577 C A); (6170
10599155 A G); (6171 10599273 T C); (6172 10599394 T C); (6173 10599678 C T); (6174 10599680 T
C); (6175 10599819 C T); (6176 10599919 A C); (6177 10600000 C A); (6178 10600149 C T); (6179
10600575 C A); (6180 10600625 T C); (6181 10600705 T C); (6182 10600865 C T); (6183 10600993 A
G); (6184 10602197 A G); (6185 10602462 C G); (6186 10602500 A C); (6187 10602559 T C); (6188
10602635 G A); (6189 10603149 A G); (6190 10603228 C CAG); (6191 10603463 C G); (6192 10603936 A
G); (6193 10604359 G A); (6194 10604673 T C); (6195 10605623 T C); (6196 10605810 G T); (6197
10606139 C T); (6198 10606305 T G); (6199 10606771 A AT); (6200 10607721 T C); (6201 10608145 A
T); (6202 10608482 G GC); (6203 10609909 G A); (6204 10610607 C T); (6205 10610822 A G); (6206
10610979 C T); (6207 10611370 C A); (6208 10611450 G A); (6209 10611767 A G); (6210 10611915 C
A); (6211 10612340 G C); (6212 10612518 T C); (6213 10613759 A G); (6214 10613883 T C); (6215
10614154 T C); (6216 10614410 GA G); (6217 10614511 T C); (6218 10614830 T A); (6219 10616025 C
T); (6220 10616068 G T); (6221 10616121 T A); (6222 10616220 A C); (6223 10616294 G A); (6224
10616431 C A); (6225 10616760 G A); (6226 10616941 C T); (6227 10617271 A G); (6228 10617677 G
GA); (6229 10617879 T A); (6230 10617945 A G); (6231 10619714 A C); (6232 10622675 A AT); (6233
10623091 A C); (6234 10624032 A G); (6235 10624069 T C); (6236 10624083 G A); (6237 10624147 T
C); (6238 10624212 C T); (6239 10624229 G A); (6240 10624295 G T); (6241 10624492 G A); (6242
10624966 T G); (6243 10625260 C T); (6244 10625280 C T); (6245 10625297 A T); (6246 10625405 G
A); (6247 10625434 C T); (6248 10625499 C T); (6249 10625625 A G); (6250 10626244 T C); (6251
10626413 A T); (6252 10626487 C G); (6253 10626670 G A); (6254 10626760 C T); (6255 10626788 G
A); (6256 10627025 A T); (6257 10627096 G A); (6258 10627380 G A); (6259 10628018 T C); (6260
10628459 T C); (6261 10628525 A C); (6262 10628882 C A); (6263 10628952 G A); (6264 10629431 A
G); (6265 10629910 G A); (6266 10630625 A G); (6267 10630994 T C); (6268 10631104 A G); (6269
10631190 G A); (6270 10632005 C T); (6271 10632316 C A); (6272 10632633 T C); (6273 10633758 C
T); (6274 10633898 C T); (6275 10634464 A C); (6276 10634869 C T); (6277 10634908 G A); (6278
10635039 AG A); (6279 10635460 T C); (6280 10636158 A G); (6281 10636926 C G); (6282 10636948 C
T); (6283 10637095 T C); (6284 10637574 CAG C); (6285 10637598 G A); (6286 10637794 A G); (6287
10637899 G A); (6288 10638053 C T); (6289 10638384 G A); (6290 10638704 A G); (6291 10639076 T
C); (6292 10639261 G A); (6293 10639342 G T); (6294 10640014 G A); (6295 10641062 A G); (6296
10641492 T G); (6297 10641540 A T); (6298 10641541 A T); (6299 10641724 G A); (6300 10641954 T
G); (6301 10642694 T C); (6302 10642765 C T); (6303 10643615 C G); (6304 10643658 G A); (6305
10643681 T G); (6306 10643712 G A); (6307 10643744 G A); (6308 10644057 C T); (6309 10644078 A
G); (6310 10644741 C T); (6311 10644819 G A); (6312 10644937 G A); (6313 10645008 T C); (6314
10645019 C T); (6315 10645215 G A); (6316 10645391 A G); (6317 10645870 A G); (6318 10645930 G
A); (6319 10646573 C T); (6320 10646666 G A); (6321 10647700 G A); (6322 10647909 C T); (6323
10649117 C T); (6324 10649409 G C); (6325 10650222 T C); (6326 10650574 T C); (6327 10651526 A
G); (6328 10651727 A G); (6329 10652399 C A); (6330 10652424 G A); (6331 10652850 G C); (6332
10652980 C T); (6333 10653949 G A); (6334 10653959 G A); (6335 10653990 T C); (6336 10654615 C
T); (6337 10655167 C T); (6338 10655247 C G); (6339 10655683 T C); (6340 10655958 T C); (6341
10656452 C T); (6342 10656901 C A); (6343 10657031 C T); (6344 10657032 A G); (6345 10657166 C
T); (6346 10657402 T C); (6347 10657508 C T); (6348 10657572 C T); (6349 10657669 C T); (6350
10657763 A T); (6351 10657798 C T); (6352 10657810 C A); (6353 10657894 C T); (6354 10657971 G
A); (6355 10658270 C A); (6356 10658327 C T); (6357 10658439 C G); (6358 10658679 G A); (6359
10658985 G A); (6360 10659284 C T); (6361 10659501 C T); (6362 10659509 C T); (6363 10660093 G
A); (6364 10660395 T C); (6365 10660646 G A); (6366 10660765 C T); (6367 10661036 G A); (6368
10661228 G A); (6369 10661526 C T); (6370 10661825 A C); (6371 10661997 C T); (6372 10662623 A
G); (6373 10662633 A G); (6374 10662702 C T); (6375 10662705 C T); (6376 10663157 G A); (6377
10663582 A G); (6378 10663900 G A); (6379 10664543 A C); (6380 10664761 C A); (6381 10665264 T
C); (6382 10666335 TTATA T); (6383 10667066 G A); (6384 10668378 A AT); (6385 10668521 G A); (6386
10668522 G A); (6387 10668559 T C); (6388 10668790 G A); (6389 10668831 A G); (6390 10669378 C
T); (6391 10669415 T G); (6392 10669659 T G); (6393 10669665 A G); (6394 10669932 C G); (6395
10670511 T C); (6396 10670900 T C); (6397 10670902 G A); (6398 10671206 T C); (6399 10671548 C
T); (6400 10671698 T G); (6401 10671848 GTT G); (6402 10672536 G T); (6403 10673038 A C); (6404
10673068 C G); (6405 10673594 G A); (6406 10674057 C T); (6407 10674186 C T); (6408 10675176 G
A); (6409 10675503 A C); (6410 10675636 G T); (6411 10676141 C G); (6412 10676196 T C); (6413
10676368 A C); (6414 10676509 G A); (6415 10676561 C T); (6416 10676574 C T); (6417 10676809 C
T); (6418 10676861 G A); (6419 10677087 T C); (6420 10677121 A T); (6421 10677171 C T); (6422
10677179 C CA); (6423 10677605 C T); (6424 10678436 A AT); (6425 10678548 CA C); (6426 10679411 A
T); (6427 10679430 G GCAC); (6428 10679591 A G); (6429 10679659 T TA); (6430 10680842 T C); (6431
10680984 G A); (6432 10681076 C T); (6433 10681126 T C); (6434 10681519 T C); (6435 10681755 A
G); (6436 10682293 T G); (6437 10682513 G A); (6438 10682797 C T); (6439 10682889 G C); (6440
10683075 A G); (6441 10683130 A G); (6442 10683143 G A); (6443 10683639 G A); (6444 10683880 C
T); (6445 10683892 T C); (6446 10683907 A G); (6447 10683952 T G); (6448 10683954 C T); (6449
10683989 T C); (6450 10684031 G A); (6451 10684114 A G); (6452 10684149 A G); (6453 10684171 T
G); (6454 10684333 A G); (6455 10684414 G C); (6456 10684518 A G); (6457 10684589 A G); (6458
10684729 T A); (6459 10684860 G A); (6460 10684959 A C); (6461 10685192 T C); (6462 10685306 G
A); (6463 10685568 C T); (6464 10685648 C T); (6465 10685865 C A); (6466 10685985 T C); (6467
10686078 C T); (6468 10686266 A G); (6469 10686427 C T); (6470 10687088 G A); (6471 10687597 G
C); (6472 10687756 C A); (6473 10688381 G A); (6474 10688410 G A); (6475 10688506 G GA); (6476
10688628 T C); (6477 10688733 G T); (6478 10688814 G A); (6479 10688817 G A); (6480 10688995 C
T); (6481 10689039 A G); (6482 10689412 G A); (6483 10689669 T A); (6484 10689877 G A); (6485
10690022 C T); (6486 10690105 G A); (6487 10690129 G A); (6488 10690316 G A); (6489 10690379 C
T); (6490 10690400 T C); (6491 10691006 C T); (6492 10691129 T G); (6493 10691318 G A); (6494
10691825 TA T); (6495 10691928 T A); (6496 10692752 T TA); (6497 10693866 T A); (6498 10693867 C
G); (6499 10693957 AT A); (6500 10694160 A G); (6501 10694213 A C); (6502 10694334 A AT); (6503
10694576 A T); (6504 10694590 AAACATAAATTAG A); (6505 10694845 C T); (6506 10694897 G A); (6507
10694910 G A); (6508 10695242 T A); (6509 10695331 G A); (6510 10695359 GA G); (6511 10695483 C
T); (6512 10695517 C T); (6513 10695590 G A); (6514 10695791 CA C); (6515 10696762 C T); (6516
10696816 A G); (6517 10696882 G T); (6518 10697339 A T); (6519 10697704 C T); (6520 10698247 T
C); (6521 10699480 A T); (6522 10699482 A T); (6523 10699663 G A); (6524 10700035 C T); (6525
10700166 C T); (6526 10700678 C T); (6527 10700735 C T); (6528 10701092 C A); (6529 10701309 G
C); (6530 10702312 C A); (6531 10703663 C T); (6532 10703796 C T); (6533 10704071 C T); (6534
10705465 G A); (6535 10706446 T C); (6536 10706607 A T); (6537 10706618 G A); (6538 10706917 C
T); (6539 10707225 G GA); (6540 10707238 G C); (6541 10707270 C T); (6542 10707300 G A); (6543
10707591 C T); (6544 10707798 A G); (6545 10707876 G A); (6546 10708012 TA T); (6547 10708070 A
G); (6548 10708075 C T); (6549 10708148 A G); (6550 10708348 G A); (6551 10708515 C T); (6552
10708559 C T); (6553 10709163 C T); (6554 10709512 T C); (6555 10709531 G A); (6556 10709587 G
A); (6557 10709788 A C); (6558 10710087 C T); (6559 10710125 G A); (6560 10710138 A G); (6561
10710152 G A); (6562 10710261 T A); (6563 10710583 C T); (6564 10710603 G A); (6565 10710631 G
A); (6566 10710772 G A); (6567 10710824 A G); (6568 10710827 A C); (6569 10710896 A G); (6570
10710992 A T); (6571 10711049 A G); (6572 10711326 G A); (6573 10711603 C T); (6574 10711752 G
A); (6575 10711753 C G); (6576 10711834 G A); (6577 10711868 G A); (6578 10711983 T A); (6579
10711998 G A); (6580 10712145 T G); (6581 10712422 C T); (6582 10713076 C T); (6583 10713512 C
T); (6584 10713719 A T); (6585 10714270 T A); (6586 10714356 T G); (6587 10714360 T A); (6588
10714677 G A); (6589 10714742 A G); (6590 10714778 C T); (6591 10715056 C T); (6592 10715148 G
T); (6593 10715165 C T); (6594 10715204 G A); (6595 10715557 A G); (6596 10715673 C T); (6597
10715711 A G); (6598 10715748 G T); (6599 10715767 C G); (6600 10715768 C G); (6601 10716056 T
C); (6602 10716097 G A); (6603 10716141 G T); (6604 10716271 A G); (6605 10716304 A G); (6606
10716463 A G); (6607 10716490 G A); (6608 10716569 G T); (6609 10716595 A G); (6610 10716730 C
T); (6611 10716758 T C); (6612 10716760 C T); (6613 10716769 A G); (6614 10716770 C T); (6615
10716866 C T); (6616 10716954 C T); (6617 10717057 G A); (6618 10717357 A G); (6619 10717492 A
G); (6620 10717538 A G); (6621 10717565 C T); (6622 10717600 A G); (6623 10717648 G A); (6624
10717739 C A); (6625 10717973 G A); (6626 10718017 C T); (6627 10718148 G A); (6628 10718195 AC
A); (6629 10718228 C T); (6630 10718284 T C); (6631 10718319 G A); (6632 10718572 A G); (6633
10718886 A G); (6634 10719354 G A); (6635 10719434 C T); (6636 10719532 A G); (6637 10719602 A
G); (6638 10719717 A G); (6639 10719831 G A); (6640 10719908 C T); (6641 10719919 G A); (6642
10719984 A G); (6643 10720174 C A); (6644 10720348 T G); (6645 10720480 G A); (6646 10720679 G
A); (6647 10720864 C T); (6648 10720972 A C); (6649 10721172 T A); (6650 10721192 T C); (6651
10721333 T C); (6652 10721632 A G); (6653 10721919 G A); (6654 10722106 A C); (6655 10722122 G
A); (6656 10722127 G A); (6657 10722260 A C); (6658 10722276 G T); (6659 10722277 C T); (6660
10722303 G A); (6661 10722347 C T); (6662 10722437 C T); (6663 10722766 C T); (6664 10722792 A
G); (6665 10722852 G A); (6666 10722917 A T); (6667 10722986 A G); (6668 10722994 C T); (6669
10723280 G A); (6670 10723281 G T); (6671 10723307 T C); (6672 10723346 A G); (6673 10723350 C
G); (6674 10723417 G A); (6675 10723657 A G); (6676 10723695 G C); (6677 10723937 G A); (6678
10724656 G A); (6679 10724662 C T); (6680 10725369 A T); (6681 10725386 G A); (6682 10725500 T
C); (6683 10725764 C T); (6684 10726088 A T); (6685 10726105 C T); (6686 10726659 G A); (6687
10726688 C T); (6688 10726718 T A); (6689 10726729 G A); (6690 10726738 A G); (6691 10726831 T
C); (6692 10726854 G A); (6693 10726903 G A); (6694 10726930 G A); (6695 10726970 C T); (6696
10726976 C T); (6697 10726981 A G); (6698 10727021 G A); (6699 10727070 T C); (6700 10727113 C
G); (6701 10727398 C T); (6702 10727559 ATCT A); (6703 10727588 G A); (6704 10727592 T C); (6705
10727783 C T); (6706 10728223 C A); (6707 10728347 G T); (6708 10728495 A G); (6709 10730265 A
C); (6710 10730742 T C); (6711 10731045 C T); (6712 10731075 C A); (6713 10731185 C T); (6714
10731253 A G); (6715 10731319 C T); (6716 10731762 T C); (6717 10732178 A T); (6718 10732655 T
C); (6719 10733189 A G); (6720 10733286 A T); (6721 10733779 C T); (6722 10734989 C CTAAT); (6723
10735076 T C); (6724 10735094 T A); (6725 10735142 C T); (6726 10735308 A G); (6727 10735479 T
C); (6728 10735513 G A); (6729 10735574 G A); (6730 10735580 T C); (6731 10735772 A G); (6732
10735774 T C); (6733 10735775 G T); (6734 10735895 T C); (6735 10736077 C G); (6736 10736448 A
C); (6737 10737096 T C); (6738 10738172 C T); (6739 10738195 C T); (6740 10738508 C T); (6741
10738712 A G); (6742 10738780 C T); (6743 10738810 C T); (6744 10739001 A C); (6745 10739072 G
A); (6746 10739120 T C); (6747 10740057 T C); (6748 10740144 C T); (6749 10740508 C G); (6750
10740696 G A); (6751 10740708 G A); (6752 10740742 C A); (6753 10740997 T C); (6754 10741019 C
T); (6755 10741047 A C); (6756 10741062 G C); (6757 10741106 A G); (6758 10741177 C T); (6759
10741258 G A); (6760 10741409 A C); (6761 10741512 T C); (6762 10741744 A G); (6763 10741806 T
C); (6764 10742026 C T); (6765 10742040 G A); (6766 10742148 G A); (6767 10742241 G A); (6768
10742577 C T); (6769 10742980 G C); (6770 10743117 C T); (6771 10743146 T A); (6772 10743183 G
A); (6773 10743190 T C); (6774 10743205 C T); (6775 10743364 C G); (6776 10743871 C T); (6777
10743978 A G); (6778 10744069 G A); (6779 10744310 G A); (6780 10744977 T G); (6781 10745059 C
A); (6782 10745072 A G); (6783 10745120 G A); (6784 10745121 C T); (6785 10745503 C T); (6786
10745654 G C); (6787 10745746 C T); (6788 10746114 C T); (6789 10746173 G A); (6790 10746261 A
C); (6791 10746315 A C); (6792 10746415 C T); (6793 10746558 G A); (6794 10746814 C T); (6795
10746974 T C); (6796 10747143 C T); (6797 10747198 T C); (6798 10747422 A C); (6799 10747505 G
A); (6800 10747523 T C); (6801 10747724 C A); (6802 10747930 T C); (6803 10747999 G A); (6804
10748099 G A); (6805 10748194 A G); (6806 10748204 C G); (6807 10748250 T C); (6808 10748374 G
A); (6809 10748407 G A); (6810 10748497 C T); (6811 10748839 C T); (6812 10749126 A G); (6813
10749214 TG T); (6814 10749274 G A); (6815 10749539 C T); (6816 10749743 C G); (6817 10749817 C
A); (6818 10749874 C T); (6819 10750088 T C); (6820 10750296 C T); (6821 10750325 C T); (6822
10750540 C T); (6823 10750678 T C); (6824 10750718 T A); (6825 10750849 G C); (6826 10750856 T
G); (6827 10750857 C A); (6828 10750860 C A); (6829 10750868 G A); (6830 10750906 C T); (6831
10751154 G A); (6832 10751172 A C); (6833 10751325 C T); (6834 10751556 A C); (6835 10751661 G
A); (6836 10753178 C T); (6837 10753196 G A); (6838 10753231 C T); (6839 10753269 A G); (6840
10753276 G A); (6841 10753291 T TG); (6842 10753355 G A); (6843 10753398 C T); (6844 10753588 A
C); (6845 10753949 A G); (6846 10755040 C T); (6847 10755167 T C); (6848 10755621 C T); (6849
10755910 G A); (6850 10756179 G A); (6851 10756358 G A); (6852 10757026 C T); (6853 10757239 T
C); (6854 10757494 C T); (6855 10757588 C T); (6856 10757664 A G); (6857 10758482 G T); (6858
10758510 A G); (6859 10758630 G A); (6860 10758823 C T); (6861 10758848 C T); (6862 10758857 G
C); (6863 10758885 A C); (6864 10759467 T A); (6865 10759498 A C); (6866 10759649 T C); (6867
10759900 G A); (6868 10760046 A G); (6869 10760229 A C); (6870 10760268 C T); (6871 10760593 G
A); (6872 10760614 A G); (6873 10760705 C T); (6874 10760726 C T); (6875 10760778 T A); (6876
10760787 C T); (6877 10760841 G A); (6878 10761349 A G); (6879 10761832 G A); (6880 10761864 T
C); (6881 10761865 G T); (6882 10761869 C G); (6883 10761871 G A); (6884 10761895
TTGTCTTTGTTGTATCTGAGTTG T); (6885 10761902 T C); (6886 10761914 C T); (6887 10761995 C
T); (6888 10762001 C T); (6889 10762039 G A); (6890 10762087 A G); (6891 10762462 C T); (6892
10763067 G A); (6893 10763145 T C); (6894 10763362 C T); (6895 10763715 G A); (6896 10763722 C
T); (6897 10763802 G T); (6898 10763875 G A); (6899 10763950 G A); (6900 10764095 G T); (6901
10764104 G T); (6902 10764344 C CT); (6903 10764728 G A); (6904 10764898 C T); (6905 10765034 G
A); (6906 10765408 T A); (6907 10765540 G A); (6908 10766489 G T); (6909 10766499 G T); (6910
10767550 C A); (6911 10767805 T A); (6912 10768139 G A); (6913 10768724 TA T); (6914 10769189 G
T); (6915 10769828 A T); (6916 10769832 TA T); (6917 10769845 T C); (6918 10769850 A T); (6919
10769986 A AGTC); (6920 10770037 A AT); (6921 10770048 A G); (6922 10770240 A C); (6923 10770375
C T); (6924 10770607 C T); (6925 10770652 G A); (6926 10770751 G GT); (6927 10770778 T C); (6928
10770802 C G); (6929 10770941 C T); (6930 10771086 T A); (6931 10771167 A G); (6932 10771258 G
A); (6933 10771693 G A); (6934 10771905 C T); (6935 10771992 C T); (6936 10772066 G A); (6937
10772398 T C); (6938 10774019 C T); (6939 10774658 A G); (6940 10774720 T G); (6941 10774737 A
G); (6942 10775080 TTC T); (6943 10775639 A T); (6944 10775872 C A); (6945 10776492 A G); (6946
10776652 G A); (6947 10776674 A ATT); (6948 10776760 G A); (6949 10777065 C T); (6950 10778779 C
A); (6951 10778951 C T); (6952 10779397 C T); (6953 10779591 C T); (6954 10779924 G A); (6955
10781323 A T); (6956 10781352 TA T); (6957 10781403 A G); (6958 10781569 T G); (6959 10781978 C
T); (6960 10782461 G A); (6961 10782654 G T); (6962 10782656 A C); (6963 10782691 T C); (6964
10782862 G GA); (6965 10783878 G A); (6966 10784260 C CTTTTCTTTTATCTTATTTT); (6967 10784973 G
T); (6968 10785003 C T); (6969 10785008 A G); (6970 10785097 C T); (6971 10785121 T C); (6972
10785517 A G); (6973 10786586 G A); (6974 10787302 C T); (6975 10787341 A T); (6976 10787352 C
T); (6977 10787562 G A); (6978 10787878 G A); (6979 10788151 G A); (6980 10788318 G T); (6981
10788363 G A); (6982 10788434 C A); (6983 10789583 G A); (6984 10789892 G A); (6985 10789947 C
T); (6986 10790147 A T); (6987 10790401 A G); (6988 10790598 G A); (6989 10790910 C T); (6990
10791059 A G); (6991 10791213 G A); (6992 10791310 T C); (6993 10791380 T A); (6994 10791401 G
A); (6995 10791494 C T); (6996 10791507 C T); (6997 10791555 T C); (6998 10791581 G A); (6999
10791767 C T); (7000 10793296 A C); (7001 10793302 T C); (7002 10793312 C A); (7003 10793343 C
G); (7004 10793368 T C); (7005 10793427 A G); (7006 10793446 A G); (7007 10793476 A C); (7008
10793479 T G); (7009 10793487 T A); (7010 10793497 G A); (7011 10793499 A G); (7012 10793507 A
G); (7013 10793596 C A); (7014 10793666 A G); (7015 10793673 C T); (7016 10793805 G T); (7017
10793828 G A); (7018 10793829 T G); (7019 10793830 G T); (7020 10793847 G A); (7021 10793863 T
A); (7022 10793865 T G); (7023 10793873 A G); (7024 10793874 G A); (7025 10793914 A G); (7026
10794030 A AT); (7027 10794031 G A); (7028 10794061 G A); (7029 10794124 A G); (7030 10794172 T
C); (7031 10794173 T A); (7032 10794477 A ATTTTT); (7033 10794655 A C); (7034 10794977 C T); (7035
10796037 C T); (7036 10796648 TG T); (7037 10798069 C T); (7038 10798090 G A); (7039 10798609 G
T); (7040 10798827 A G); (7041 10799013 G A); (7042 10799081 T C); (7043 10799206 TA T); (7044
10799247 T C); (7045 10799313 G A); (7046 10799348 G A); (7047 10799391 A G); (7048 10799424 C
T); (7049 10799550 T G); (7050 10799558 A G); (7051 10799570 A G); (7052 10799571 T C); (7053
10799578 G A); (7054 10799580 C T); (7055 10799592 A G); (7056 10799598 C T); (7057 10799604 A
G); (7058 10799619 A T); (7059 10799637 C T); (7060 10799736 T C); (7061 10799739 T C); (7062
10799752 A G); (7063 10799757 T G); (7064 10801092 G T); (7065 10801140 C T); (7066 10801149 T
C); (7067 10801173 C T); (7068 10801182 A G); (7069 10801236 T A); (7070 10801775 A G); (7071
10801830 A G); (7072 10801866 T C); (7073 10802064 A G); (7074 10802127 G A); (7075 10803945 A
G); (7076 10804074 T G); (7077 10804129 C T); (7078 10804264 C T); (7079 10804337 T G); (7080
10804367 T C); (7081 10804392 A G); (7082 10805745 G C); (7083 10805944 A C); (7084 10805963 T
A); (7085 10806224 C T); (7086 10806294 G A); (7087 10807195 A T); (7088 10807197 G
GACTTGGTCCATGCCGAAT); (7089 10807380 A G); (7090 10807467 A G); (7091 10808141 C G); (7092
10808243 G T); (7093 10808562 C T); (7094 10808756 T C); (7095 10809134 G A); (7096 10809630 C
T); (7097 10809634 A G); (7098 10809781 A G); (7099 10809837 T C); (7100 10809939 G A); (7101
10810147 T C); (7102 10811973 G T); (7103 10812074 T C); (7104 10812201 C T); (7105 10812309 G
A); (7106 10812350 C T); (7107 10812449 G A); (7108 10812477 A G); (7109 10812511 G A); (7110
10813051 T C); (7111 10813303 C T); (7112 10813592 C T); (7113 10813850 C T); (7114 10813985 T
C); (7115 10814222 A G); (7116 10815126 G A); (7117 10815190 C T); (7118 10815242 T TCTTTTC); (7119
10815598 G A); (7120 10815620 C T); (7121 10816252 C G); (7122 10817292 G C); (7123 10817592 G
A); (7124 10817624 G A); (7125 10817703 T C); (7126 10817883 T C); (7127 10818106 C T); (7128
10818549 G T); (7129 10818591 C A); (7130 10818729 G T); (7131 10818783 G A); (7132 10819847 C
A); (7133 10819853 G A); (7134 10819986 T C); (7135 10820187 C T); (7136 10820375 AT A); (7137
10822204 C T); (7138 10822896 G A); (7139 10823141 C T); (7140 10823256 C T); (7141 10823433 A
G); (7142 10823605 C T); (7143 10823640 G A); (7144 10823737 A G); (7145 10823913 T A); (7146
10823931 C T); (7147 10824574 G GT); (7148 10824717 C T); (7149 10824823 C T); (7150 10824905 G
A); (7151 10824950 G T); (7152 10824958 G T); (7153 10825068 G A); (7154 10825244 T C); (7155
10825247 G A); (7156 10825377 T G); (7157 10825583 C T); (7158 10826277 T C); (7159 10826593 C
T); (7160 10826600 G A); (7161 10826715 C T); (7162 10826896 G A); (7163 10826929 G A); (7164
10828353 G A); (7165 10828414 C T); (7166 10828508 G A); (7167 10829215 A G); (7168 10830347 C
A); (7169 10831333 C T); (7170 10831409 A G); (7171 10831433 C T); (7172 10831533 C T); (7173
10831660 T C); (7174 10831685 C T); (7175 10832017 C T); (7176 10832133 C T); (7177 10832260 C
T); (7178 10832300 G A); (7179 10832550 T C); (7180 10832584 G A); (7181 10833043 G A); (7182
10833393 T C); (7183 10833575 G A); (7184 10833609 A G); (7185 10834108 C T); (7186 10834339 C
A); (7187 10834376 T C); (7188 10834589 C CT); (7189 10834770 G A); (7190 10835023 A G); (7191
10835184 C T); (7192 10835276 C A); (7193 10835888 G A); (7194 10837791 T TA); (7195 10838232 A
G); (7196 10840073 CTTA C); (7197 10840542 C T); (7198 10841146 T C); (7199 10841244 G A); (7200
10841287 C T); (7201 10841351 C T); (7202 10841521 A G); (7203 10841552 A G); (7204 10841832 C
T); (7205 10842004 G A); (7206 10842294 A G); (7207 10843136 G A); (7208 10844045 T G); (7209
10844929 G A); (7210 10845880 C T); (7211 10846061 T G); (7212 10846449 C T); (7213 10847991 A
T); (7214 10848542 A T); (7215 10848664 T G); (7216 10849715 C G); (7217 10850945 T C); (7218
10850956 A G); (7219 10851072 A T); (7220 10851113 A T); (7221 10851710 G A); (7222 10851725 G
A); (7223 10851986 G A); (7224 10851987 C T); (7225 10852013 C T); (7226 10852201 A T); (7227
10852345 G A); (7228 10852745 T C); (7229 10853085 A AT); (7230 10853364 C T); (7231 10854404 G
A); (7232 10855281 TA T); (7233 10855466 T A); (7234 10855549 G A); (7235 10855609 G T); (7236
10855610 A T); (7237 10855767 TACTAAGTAAAACA T); (7238 10855813 A C); (7239 10857622 C
T); (7240 10857663 C A); (7241 10857911 T TA); (7242 10857990 C A); (7243 10858044 G A); (7244
10858090 G GT); (7245 10858096 CA C); (7246 10858115 G A); (7247 10858146 C T); (7248 10858198 G
A); (7249 10858233 C CA); (7250 10858436 G A); (7251 10858455 G C); (7252 10858504 T C); (7253
10858657 T G); (7254 10858732 C G); (7255 10858960 G A); (7256 10858971 C T); (7257 10858994 T
C); (7258 10858998 G C); (7259 10859013 A G); (7260 10859015 T A); (7261 10859067 C T); (7262
10859117 C T); (7263 10859304 A G); (7264 10859330 C T); (7265 10859573 G T); (7266 10859687 T
A); (7267 10859744 T TA); (7268 10859755 G A); (7269 10859870 A T); (7270 10860117 A G); (7271
10860118 G T); (7272 10860132 T C); (7273 10860174 G A); (7274 10860253 G A); (7275 10860318 G
A); (7276 10861973 A G); (7277 10862100 C T); (7278 10863033 T G); (7279 10864436 C
CTACCTCACTTCACA); (7280 10864540 C A); (7281 10864643 G C); (7282 10864648 C T); (7283 10864926
CT); (7284 10864980 A G); (7285 10865113 A T); (7286 10865224 T C); (7287 10865229 A T); (7288
10865787 CAA C); (7289 10865949 G A); (7290 10865950 T G); (7291 10866055 T A); (7292 10866142 C
T); (7293 10866171 G A); (7294 10866239 A G); (7295 10866240 C T); (7296 10866246 G T); (7297
10866262 C A); (7298 10866349 T C); (7299 10866403 G A); (7300 10866419 C T); (7301 10866483 G
C); (7302 10866493 A G); (7303 10866521 G A); (7304 10866856 C T); (7305 10866943 T G); (7306
10867054 C T); (7307 10867072 C G); (7308 10867158 G A); (7309 10867232 T G); (7310 10867286 G
A); (7311 10867294 C T); (7312 10867366 A G); (7313 10867536 G A); (7314 10867767 C T); (7315
10867843 T C); (7316 10867920 T C); (7317 10867950 C T); (7318 10868018 A G); (7319 10868138 G
C); (7320 10868149 T C); (7321 10868154 G T); (7322 10868159 G T); (7323 10868183 T C); (7324
10868268 G A); (7325 10868360 A G); (7326 10868494 A G); (7327 10868535 C T); (7328 10868596 C
A); (7329 10868663 C T); (7330 10868830 G C); (7331 10868906 T C); (7332 10869105 G A); (7333
10869130 G C); (7334 10869162 C A); (7335 10869254 G A); (7336 10869377 G A); (7337 10869519 AG
A); (7338 10869763 A G); (7339 10869789 C T); (7340 10869842 A G); (7341 10869844 C T); (7342
10869894 GA G); (7343 10871113 G A); (7344 10871240 T C); (7345 10872895 C T); (7346 10872960 C
T); (7347 10873039 C T); (7348 10873081 A G); (7349 10873095 C A); (7350 10873096 T C); (7351
10873343 T A); (7352 10873458 C T); (7353 10873473 A AT); (7354 10873526 A T); (7355 10873640 C
A); (7356 10873895 G A); (7357 10873921 T C); (7358 10874212 T C); (7359 10874227 C G); (7360
10874231 A G); (7361 10874254 G A); (7362 10874265 C T); (7363 10874493 G C); (7364 10874721 A
G); (7365 10874770 C G); (7366 10874789 C T); (7367 10874964 A G); (7368 10874998 A AT); (7369
10875027 C T); (7370 10875079 G A); (7371 10875110 C T); (7372 10875131 AT A); (7373 10875143 C
CA); (7374 10875181 C T); (7375 10875235 G T); (7376 10875321 A AT); (7377 10875562 G T); (7378
10875603 G A); (7379 10877412 T G); (7380 10877475 AAGTTGTTTTACTT A); (7381 10877918 T
C); (7382 10877930 G A); (7383 10877948 G A); (7384 10878077 A G); (7385 10878106 C T); (7386
10878185 T C); (7387 10878213 T C); (7388 10878287 A G); (7389 10878438 T A); (7390 10878862 T
G); (7391 10879412 T A); (7392 10879649 C A); (7393 10879720 A G); (7394 10879760 G C); (7395
10879908 TTATA T); (7396 10879979 A T); (7397 10880001 A T); (7398 10880021 T G); (7399 10880254
C T); (7400 10880260 T TGACATGACATTGTAGG); (7401 10880271 A T); (7402 10880313 G A); (7403
10880321 T G); (7404 10880324 T G); (7405 10880369 C T); (7406 10880384 T G); (7407 10880408 T
A); (7408 10880415 C CTG); (7409 10880425 T A); (7410 10880427 A G); (7411 10880470 A G); (7412
10880521 G T); (7413 10880528 T A); (7414 10880576 G T); (7415 10880684 A G); (7416 10880948 T
G); (7417 10881334 G C); (7418 10881474 A G); (7419 10881586 T C); (7420 10881749 C A); (7421
10881948 A C); (7422 10882677 A G); (7423 10882680 A G); (7424 10882689 T C); (7425 10882748 A
G); (7426 10882808 G A); (7427 10882878 G T); (7428 10882896 C T); (7429 10883000 G A); (7430
10883156 C T); (7431 10883201 A G); (7432 10883324 T G); (7433 10883383 C T); (7434 10883517 G
A); (7435 10883522 A G); (7436 10883705 G A); (7437 10883799 G A); (7438 10884172 T G); (7439
10884726 A G); (7440 10884777 C T); (7441 10884863 T C); (7442 10884981 A T); (7443 10885127 A
G); (7444 10885728 C T); (7445 10885790 T C); (7446 10886125 C T); (7447 10886248 A C); (7448
10886413 G A); (7449 10886487 G A); (7450 10886492 C T); (7451 10886511 A G); (7452 10886558 CT
C); (7453 10886596 T A); (7454 10886940 T C); (7455 10886943 T G); (7456 10887031 A T); (7457
10887143 G A); (7458 10887273 C T); (7459 10887310 T A); (7460 10887714 G A); (7461 10887793 A
T); (7462 10888087 G A); (7463 10888214 G C); (7464 10888410 A G); (7465 10888646 T C); (7466
10888729 T C); (7467 10888926 A G); (7468 10888969 AC A); (7469 10888977 C T); (7470 10888992 G
T); (7471 10889065 G A); (7472 10889084 T A); (7473 10889113 G A); (7474 10889159 C T); (7475
10889291 G A); (7476 10889302 C T); (7477 10889388 A C); (7478 10889446 G A); (7479 10889546 T
C); (7480 10889678 G A); (7481 10891278 G A); (7482 10891290 G A); (7483 10891302 G T); (7484
10891439 G A); (7485 10891442 A G); (7486 10891598 A G); (7487 10891612 T C); (7488 10891971 A
G); (7489 10892161 A G); (7490 10892215 C A); (7491 10892326 G A); (7492 10892592 C A); (7493
10892612 C T); (7494 10892621 T C); (7495 10892735 A G); (7496 10892762 G T); (7497 10892843 C
T); (7498 10892926 C T); (7499 10892960 T C); (7500 10892975 A G); (7501 10892980 T C); (7502
10892981 A G); (7503 10893019 A G); (7504 10893282 C T); (7505 10893468 G A); (7506 10893575 C
G); (7507 10893674 T C); (7508 10893729 A G); (7509 10893805 T C); (7510 10893843 C T); (7511
10893953 A G); (7512 10894195 G A); (7513 10894246 T C); (7514 10894268 C T); (7515 10894331 C
T); (7516 10894360 C T); (7517 10894397 A G); (7518 10894447 A T); (7519 10894575 A G); (7520
10894706 A G); (7521 10894735 C T); (7522 10895235 T C); (7523 10895294 G A); (7524 10895322 G
A); (7525 10896266 A G); (7526 10896318 T C); (7527 10896393 A G); (7528 10896505 G T); (7529
10896525 C T); (7530 10896604 A G); (7531 10896782 G A); (7532 10896885 A G); (7533 10896953 T
C); (7534 10896988 T C); (7535 10897118 G A); (7536 10897141 C T); (7537 10897206 G T); (7538
10897218 G A); (7539 10897273 C T); (7540 10897308 T C); (7541 10897360 C T); (7542 10897366 T
G); (7543 10897413 C T); (7544 10898131 T C); (7545 10898292 A C); (7546 10898310 G A); (7547
10898313 T C); (7548 10898315 A G); (7549 10898494 A G); (7550 10898970 C T); (7551 10899057 TA
T); (7552 10899144 T C); (7553 10899212 G A); (7554 10899257 T C); (7555 10899300 T C); (7556
10899363 GT G); (7557 10899547 C T); (7558 10899563 C T); (7559 10899626 G A); (7560 10899731 G
C); (7561 10899818 G C); (7562 10899830 G A); (7563 10899854 T C); (7564 10899905 G C); (7565
10899907 G GC); (7566 10900005 A G); (7567 10900251 G A); (7568 10900401 T A); (7569 10900632 A
C); (7570 10900689 A G); (7571 10900757 A T); (7572 10900818 A G); (7573 10900835 A G); (7574
10900894 A T); (7575 10900929 A G); (7576 10901117 G A); (7577 10901191 T C); (7578 10901306 T
C); (7579 10901307 G A); (7580 10901318 T A); (7581 10901330 A G); (7582 10901364 G A); (7583
10901384 T G); (7584 10901416 G T); (7585 10901551 G A); (7586 10901563 T C); (7587 10901605 T
C); (7588 10901620 T C); (7589 10901649 G A); (7590 10901651 C T); (7591 10901726 C T); (7592
10901887 T C); (7593 10901910 A G); (7594 10901913 T C); (7595 10901923 G A); (7596 10901952 A
T); (7597 10902151 T C); (7598 10902249 C G); (7599 10902368 A G); (7600 10902387 C T); (7601
10902559 T C); (7602 10902613 G T); (7603 10902678 T G); (7604 10902795 A G); (7605 10902899 T
C); (7606 10902904 G A); (7607 10902957 G A); (7608 10902980 C T); (7609 10903066 C T); (7610
10903103 T C); (7611 10903112 T C); (7612 10903174 G A); (7613 10903185 C T); (7614 10903236 C
A); (7615 10903286 C T); (7616 10903321 G A); (7617 10903474 T TA); (7618 10903900 T C); (7619
10903996 G C); (7620 10904010 T C); (7621 10904043 T A); (7622 10904080 C T); (7623 10904595 G
C); (7624 10905122 G T); (7625 10905156 A G); (7626 10905540 T C); (7627 10905840 C T); (7628
10906084 T TC); (7629 10906401 G C); (7630 10906535 T C); (7631 10906589 G GA); (7632 10906674 T
C); (7633 10906721 AACT A); (7634 10906938 T C); (7635 10907123 G T); (7636 10907161 C T); (7637
10907207 A C); (7638 10907220 G A); (7639 10907270 A AT); (7640 10907493 A G); (7641 10907544 C
T); (7642 10907547 G A); (7643 10907595 T C); (7644 10907665 T A); (7645 10907666 T A); (7646
10907684 T C); (7647 10907795 C T); (7648 10907830 T C); (7649 10907844 G A); (7650 10907888 T
C); (7651 10907913 A G); (7652 10907918 A G); (7653 10907978 A C); (7654 10908073 C A); (7655
10908106 C T); (7656 10908254 T C); (7657 10908417 T A); (7658 10908826 A G); (7659 10909125 A
G); (7660 10909216 G T); (7661 10909270 C T); (7662 10909272 T C); (7663 10909303 A C); (7664
10909335 G A); (7665 10909594 C A); (7666 10909794 A G); (7667 10909819 G A); (7668 10909821 T
C); (7669 10909843 A G); (7670 10909863 C T); (7671 10909899 C T); (7672 10910214 T C); (7673
10910352 A T); (7674 10910362 A G); (7675 10910434 T A); (7676 10911047 G A); (7677 10911230 A
C); (7678 10911459 G A); (7679 10911637 G C); (7680 10911669 T C); (7681 10911701 C T); (7682
10911740 C T); (7683 10911800 A C); (7684 10911950 A C); (7685 10912005 T C); (7686 10912169 T
C); (7687 10912222 G A); (7688 10912268 A G); (7689 10912546 C CGATGAATTATTTTCCATTGTCT); (7690
10912548 C G); (7691 10912549 C A); (7692 10912634 G A); (7693 10912676 G A); (7694 10912696 T
C); (7695 10912761 T C); (7696 10912852 A G); (7697 10912999 C T); (7698 10913137 C T); (7699
10913212 C T); (7700 10913332 G T); (7701 10913337 G T); (7702 10913416 T C); (7703 10913475 T
G); (7704 10913477 T C); (7705 10913528 C T); (7706 10913653 A T); (7707 10915247 T G); (7708
10915269 G A); (7709 10915375 T C); (7710 10915416 G T); (7711 10915461 G A); (7712 10915513 A
G); (7713 10915555 A G); (7714 10915585 A G); (7715 10915624 C T); (7716 10915637 A G); (7717
10915672 G C); (7718 10915678 G C); (7719 10915705 C T); (7720 10915846 T A); (7721 10915859 A
G); (7722 10915902 T G); (7723 10916052 T C); (7724 10916088 G A); (7725 10916122 A G); (7726
10916131 T C); (7727 10916166 T C); (7728 10916224 G A); (7729 10916276 C T); (7730 10916300 C
T); (7731 10916302 A G); (7732 10916320 C T); (7733 10916326 G A); (7734 10916338 G T); (7735
10916401 G A); (7736 10916442 C T); (7737 10916501 G A); (7738 10916502 A C); (7739 10916518 G
A); (7740 10916521 A G); (7741 10916549 T C); (7742 10916595 C G); (7743 10916602 T C); (7744
10916617 A G); (7745 10916626 T C); (7746 10916660 G T); (7747 10916662 T C); (7748 10916742 G
A); (7749 10916765 C T); (7750 10916775 G A); (7751 10916813 C T); (7752 10916850 G T); (7753
10916852 A C); (7754 10916866 T C); (7755 10917034 T C); (7756 10917071 C G); (7757 10917078 G
A); (7758 10917122 A G); (7759 10917141 G A); (7760 10917163 C G); (7761 10917195 A G); (7762
10917208 T A); (7763 10917285 G A); (7764 10917290 A G); (7765 10917292 C T); (7766 10917388 T
A); (7767 10917405 G A); (7768 10917523 A G); (7769 10917531 C T); (7770 10917542 T C); (7771
10917569 T C); (7772 10917590 A G); (7773 10917620 A G); (7774 10917661 A G); (7775 10917677 T
C); (7776 10917697 A G); (7777 10917708 T C); (7778 10917721 A G); (7779 10917732 T G); (7780
10917733 G C); (7781 10917744 T C); (7782 10917765 T C); (7783 10917853 G A); (7784 10917884 T
C); (7785 10917915 T G); (7786 10918309 G A); (7787 10918448 G T); (7788 10918748 A T); (7789
10918783 G A); (7790 10918820 T C); (7791 10919233 A C); (7792 10919480 A C); (7793 10919552 A
G); (7794 10920209 TA T); (7795 10920379 C A); (7796 10920492 C A); (7797 10921864 A T); (7798
10922082 A G); (7799 10923465 C CAG); (7800 10924016 G C); (7801 10924441 T TA); (7802 10924947 T
C); (7803 10925658 G A); (7804 10925801 C T); (7805 10926102 A G); (7806 10926264 C T); (7807
10926550 C T); (7808 10926551 A G); (7809 10926571 A T); (7810 10926905 CA C); (7811 10928276 G
A); (7812 10928638 T C); (7813 10928753 T C); (7814 10928755 T C); (7815 10928757 T C); (7816
10928839 G A); (7817 10928947 G A); (7818 10929262 T C); (7819 10929294 A G); (7820 10929360 G
A); (7821 10929962 T G); (7822 10930200 G A); (7823 10930639 G A); (7824 10930769 A G); (7825
10930976 T C); (7826 10931246 AT A); (7827 10931338 G A); (7828 10931347 C T); (7829 10931423 T
C); (7830 10931778 A G); (7831 10931873 TA T); (7832 10932060 C T); (7833 10932128 T A); (7834
10932204 CA C); (7835 10932553 T G); (7836 10932913 A C); (7837 10932923 C T); (7838 10933030 C
T); (7839 10933110 C T); (7840 10933253 G A); (7841 10933390 G C); (7842 10933445 T C); (7843
10933479 G A); (7844 10933810 A G); (7845 10934159 A G); (7846 10934300 T G); (7847 10934380 A
G); (7848 10934420 C CG); (7849 10934485 G A); (7850 10935023 C T); (7851 10935252 A C); (7852
10935310 C T); (7853 10935949 T G); (7854 10935958 A G); (7855 10936169 G T); (7856 10936544 T
C); (7857 10936582 G A); (7858 10936616 G A); (7859 10937639 T G); (7860 10938028 C T); (7861
10938045 G A); (7862 10938471 G A); (7863 10938574 A G); (7864 10939100 G T); (7865 10939118 C
A); (7866 10939492 T G); (7867 10939617 C T); (7868 10939828 G A); (7869 10939839 C G); (7870
10939979 G A); (7871 10940016 C T); (7872 10940020 G A); (7873 10940192 C T); (7874 10940205 A
G); (7875 10940381 C T); (7876 10940561 C T); (7877 10940628 T G); (7878 10940800 A G); (7879
10941067 C G); (7880 10941155 T C); (7881 10941560 G A); (7882 10941597 C T); (7883 10941629 C
T); (7884 10941918 A ATCT); (7885 10942059 C T); (7886 10942107 A G); (7887 10942470 C T); (7888
10942886 G A); (7889 10943050 C T); (7890 10943076 G T); (7891 10943170 C T); (7892 10943423 T
C); (7893 10943506 G GTA); (7894 10943546 C G); (7895 10943667 G A); (7896 10944441 C A); (7897
10945102 T C); (7898 10945185 G A); (7899 10945732 C T); (7900 10946097 C T); (7901 10946459 C
T); (7902 10946700 A G); (7903 10946818 A T); (7904 10947714 C CT); (7905 10947789 C T); (7906
10948931 C A); (7907 10948974 C T); (7908 10949267 A C); (7909 10949434 G T); (7910 10949594 C
T); (7911 10949657 G T); (7912 10950073 A G); (7913 10950083 G A); (7914 10950168 T C); (7915
10951974 G A); (7916 10952005 G A); (7917 10952390 G T); (7918 10952697 A T); (7919 10953175 G
T); (7920 10954327 A G); (7921 10954623 G A); (7922 10955236 C A); (7923 10956316 G C); (7924
10957399 C T); (7925 10958677 CT C); (7926 10958876 C CT); (7927 10959154 T C); (7928 10960650 A
T); (7929 10960770 C T); (7930 10960997 A AAC); (7931 10961033 C T); (7932 10961133 C G); (7933
10961138 T C); (7934 10961155 A G); (7935 10961176 T C); (7936 10961238 C T); (7937 10961688 T
A); (7938 10961942 C T); (7939 10962279 C T); (7940 10962449 G A); (7941 10962477 G A); (7942
10962520 T C); (7943 10962603 G A); (7944 10962623 C T); (7945 10962697 T A); (7946 10963127 T
C); (7947 10963173 G C); (7948 10963350 A G); (7949 10963597 G C); (7950 10963852 G A); (7951
10964006 C CTATT); (7952 10964727 A T); (7953 10964744 G A); (7954 10965873 T G); (7955 10967208
G T); (7956 10967260 T C); (7957 10967585 C T); (7958 10967724 G A); (7959 10968866 A AT); (7960
10969061 T A); (7961 10970097 G A); (7962 10971348 T C); (7963 10971364 G T); (7964 10971380 T
G); (7965 10971484 T A); (7966 10971548 T TA); (7967 10972163 A AT); (7968 10972280 A T); (7969
10972327 TA T); (7970 10972356 C G); (7971 10972779 T TATG); (7972 10973623 G A); (7973 10973730
G A); (7974 10973756 T C); (7975 10973767 T C); (7976 10973772 G A); (7977 10973800 C G); (7978
10973871 A G); (7979 10973944 C T); (7980 10973956 A C); (7981 10974007 T C); (7982 10974020 C
A); (7983 10974081 T C); (7984 10974088 G C); (7985 10974252 C T); (7986 10974288 A AGT); (7987
10974397 C T); (7988 10974426 G A); (7989 10974463 G A); (7990 10974498 A G); (7991 10974560 C
T); (7992 10974600 TTTTAG T); (7993 10974639 A G); (7994 10974815 G A); (7995 10975225 A T); (7996
10975444 T C); (7997 10975610 AT A); (7998 10976802 A T); (7999 10976819 A AGC); (8000 10976918 T
C); (8001 10977017 T C); (8002 10977248 C T); (8003 10977302 T C); (8004 10977303 C T); (8005
10977319 G A); (8006 10977424 T A); (8007 10977524 A T); (8008 10977557 A G); (8009 10977583 T
TAA); (8010 10977694 C T); (8011 10977840 A G); (8012 10977856 T C); (8013 10977893 A C); (8014
10977946 T C); (8015 10978310 A G); (8016 10978493 G A); (8017 10978504 G A); (8018 10978674 G
A); (8019 10978691 G A); (8020 10978699 T C); (8021 10978791 T C); (8022 10978972 T C); (8023
10979302 T A); (8024 10979814 A AG); (8025 10980015 T A); (8026 10980193 T C); (8027 10980369 A
T); (8028 10980384 T C); (8029 10980462 G T); (8030 10980583 G A); (8031 10980673 A T); (8032
10980911 G A); (8033 10981080 T C); (8034 10981112 A G); (8035 10981118 G C); (8036 10981241 C
A); (8037 10981484 A T); (8038 10981571 C T); (8039 10981704 T C); (8040 10982259 G C); (8041
10982402 A T); (8042 10982412 A G); (8043 10982417 G A); (8044 10982519 T G); (8045 10982555 C
T); (8046 10982588 G C); (8047 10982647 T C); (8048 10982669 C T); (8049 10982675 C T); (8050
10982706 A G); (8051 10982832 G A); (8052 10983931 A G); (8053 10984060 T G); (8054 10984107 A
G); (8055 10984214 T A); (8056 10984224 A C); (8057 10985123 A C); (8058 10985179 G A); (8059
10985191 G A); (8060 10985201 T C); (8061 10985213 A G); (8062 10985237 C T); (8063 10985252 C
T); (8064 10985274 G A); (8065 10985310 A G); (8066 10985341 T C); (8067 10985612 T C); (8068
10985891 A G); (8069 10985901 C T); (8070 10985914 G C); (8071 10985990 A C); (8072 10986074 A
G); (8073 10986158 G A); (8074 10987015 C T); (8075 10987050 G A); (8076 10987102 T C); (8077
10987202 T C); (8078 10987380 T G); (8079 10987397 G A); (8080 10987446 C T); (8081 10987490 C
T); (8082 10987564 TA T); (8083 10987797 A G); (8084 10988359 G T); (8085 10988630 C T); (8086
10989249 A G); (8087 10989394 T G); (8088 10989528 G A); (8089 10989543 C T); (8090 10990051 G
C); (8091 10990497 T C); (8092 10990516 C T); (8093 10991111 C T); (8094 10991141 G C); (8095
10991157 A G); (8096 10991508 G A); (8097 10991652 G A); (8098 10992023 T C); (8099 10992166 C
T); (8100 10992290 T C); (8101 10992333 A G); (8102 10992861 A G); (8103 10992908 C A); (8104
10993313 G A); (8105 10993386 C T); (8106 10993414 G A); (8107 10993532 G A); (8108 10993535 G
T); (8109 10993574 C T); (8110 10993629 G T); (8111 10993630 A T); (8112 10993684 G A); (8113
10993767 C A); (8114 10993823 G T); (8115 10994405 C T); (8116 10994792 T G); (8117 10995483 C
T); (8118 10995607 G A); (8119 10995621 T C); (8120 10996046 T G); (8121 10996086 G T); (8122
10996196 T C); (8123 10996229 G A); (8124 10997183 A C); (8125 10997224 A G); (8126 10997239 A
G); (8127 10997272 GA G); (8128 10997454 T G); (8129 10997747 T C); (8130 10997968 G T); (8131
10997997 A G); (8132 10998057 T C); (8133 10998222 A G); (8134 10998404 GTGA G); (8135 10998438
A G); (8136 10998979 A C); (8137 10999189 T G); (8138 10999199 A G); (8139 10999218 T C); (8140
10999299 T C); (8141 10999348 G A); (8142 10999501 G A); (8143 10999667 G A); (8144 11000193 C
T); (8145 11000338 G A); (8146 11000651 A G); (8147 11001127 C T); (8148 11001296 G T); (8149
11001573 A T); (8150 11001786 A T); (8151 11001949 T C); (8152 11002106 A G); (8153 11002272 T
G); (8154 11002492 A G); (8155 11002586 A G); (8156 11002746 T TAAG); (8157 11003231 A T); (8158
11003611 T G); (8159 11003859 G C); (8160 11003886 GC G); (8161 11003991 A T); (8162 11004326 A
G); (8163 11004341 G A); (8164 11004513 G A); (8165 11005079 T C); (8166 11005349 C T); (8167
11005442 A G); (8168 11005753 T C); (8169 11005820 C G); (8170 11006044 G A); (8171 11006103 T
C); (8172 11006142 A C); (8173 11006143 T A); (8174 11006149 T C); (8175 11006336 A T); (8176
11006417 T G); (8177 11006454 C A); (8178 11006458 T A); (8179 11006539 C T); (8180 11006785 A
G); (8181 11006811 C T); (8182 11006839 G A); (8183 11007246 A G); (8184 11007306 G A); (8185
11010436 C T); (8186 11010641 C G); (8187 11010841 C T); (8188 11011054 T C); (8189 11011685 G
A); (8190 11011746 G A); (8191 11012206 G A); (8192 11012340 A C); (8193 11012463 C T); (8194
11012709 C G); (8195 11012934 T TA); (8196 11012947 A G); (8197 11013141 A G); (8198 11013173 G
A); (8199 11013222 G A); (8200 11013391 G A); (8201 11013849 A G); (8202 11014227 A C); (8203
11014374 G A); (8204 11014517 C T); (8205 11014763 G A); (8206 11015388 T C); (8207 11015501 C
T); (8208 11015633 C G); (8209 11016008 T C); (8210 11016087 G A); (8211 11016284 A T); (8212
11016353 G A); (8213 11016978 C T); (8214 11017058 A G); (8215 11017106 C T); (8216 11017466 T
C); (8217 11017572 A G); (8218 11017637 T C); (8219 11017709 C T); (8220 11017882 A G); (8221
11017971 C A); (8222 11018108 G A); (8223 11018446 C A); (8224 11018569 G T); (8225 11018735 T
G); (8226 11018840 A G); (8227 11019254 G A); (8228 11019351 T C); (8229 11019453 G A); (8230
11019457 C T); (8231 11019512 G A); (8232 11019699 C T); (8233 11019718 C G); (8234 11019803 C
T); (8235 11019826 C T); (8236 11019916 C T); (8237 11020165 T G); (8238 11020179 C T); (8239
11020276 C T); (8240 11020407 C T); (8241 11020836 A G); (8242 11021043 A G); (8243 11021265 G
A); (8244 11021278 A G); (8245 11021336 A C); (8246 11021429 G T); (8247 11021449 T G); (8248
11021712 G A); (8249 11022093 A G); (8250 11022466 TGGGC T); (8251 11022514 G A); (8252 11022517
A C); (8253 11023094 G A); (8254 11023227 A C); (8255 11023406 C T); (8256 11023584 T G); (8257
11023669 C G); (8258 11023746 AC A); (8259 11023771 T C); (8260 11023964 A C); (8261 11024140 C
T); (8262 11024300 G A); (8263 11024308 T A); (8264 11024336 C T); (8265 11024374 T C); (8266
11024388 C T); (8267 11024677 G C); (8268 11024697 A G); (8269 11024934 C A); (8270 11025143 A
G); (8271 11025477 C T); (8272 11026543 A T); (8273 11026675 T C); (8274 11027859 C T); (8275
11028026 G GA); (8276 11028289 T A); (8277 11028292 A ATACAT); (8278 11028535 G A); (8279
11028693 T C); (8280 11028705 A C); (8281 11028867 T C); (8282 11028986 A G); (8283 11029123 A
AT); (8284 11029738 T G); (8285 11029890 T G); (8286 11030105 A G); (8287 11030559 A G); (8288
11030848 G A); (8289 11031608 C T); (8290 11031848 A T); (8291 11031963 A G); (8292 11032694 A
G); (8293 11032970 T C); (8294 11033172 T G); (8295 11033921 A G); (8296 11033968 A G); (8297
11034076 T A); (8298 11034110 G GA); (8299 11034186 A G); (8300 11034219 C T); (8301 11034259 T
C); (8302 11034313 A G); (8303 11034656 G A); (8304 11034725 C G); (8305 11035055 T C); (8306
11035546 T C); (8307 11035689 C CAACT); (8308 11035746 C T); (8309 11035911 C A); (8310 11036177
C T); (8311 11036353 A T); (8312 11036443 T C); (8313 11036499 G A); (8314 11036522 C T); (8315
11036582 G A); (8316 11036675 A G); (8317 11036896 T C); (8318 11037674 T C); (8319 11037736 T
C); (8320 11038393 A T); (8321 11038514 A C); (8322 11038522 AG A); (8323 11038801 T G); (8324
11040589 CGAATGATGGAGAA C); (8325 11040756 T A); (8326 11040935 G
GTTGTCAATATTTATTCTTGTT); (8327 11041227 G A); (8328 11041486 G A); (8329 11041511 G A); (8330
11041735 T C); (8331 11041833 C T); (8332 11041892 T C); (8333 11042361 G A); (8334 11043633 A
G); (8335 11044581 G T); (8336 11044825 G A); (8337 11044936 C T); (8338 11045092 G A); (8339
11045268 T TACTTACAGATCTTATGTA); (8340 11045901 C A); (8341 11045972 A T); (8342 11046146 C
T); (8343 11046874 A G); (8344 11047350 A G); (8345 11047427 A G); (8346 11047785 A AT); (8347
11047878 T A); (8348 11048007 C T); (8349 11048191 G A); (8350 11049022 G C); (8351 11049296 T
TTCA); (8352 11049401 A G); (8353 11049497 A G); (8354 11049601 G A); (8355 11049667 T C); (8356
11049695 C T); (8357 11049811 G A); (8358 11049921 T A); (8359 11049971 C A); (8360 11050240 T
A); (8361 11050342 AT A); (8362 11050690 G A); (8363 11051352 G GT); (8364 11051362 C T); (8365
11051560 C T); (8366 11052643 A T); (8367 11052741 A G); (8368 11052912 T G); (8369 11052989 C
T); (8370 11053036 T A); (8371 11053176 G A); (8372 11053277 T C); (8373 11053349 G A); (8374
11053452 T C); (8375 11053648 C T); (8376 11053926 G C); (8377 11053982 A G); (8378 11054064 T
C); (8379 11054159 G A); (8380 11054254 AAG A); (8381 11054585 C T); (8382 11054775 C T); (8383
11054818 T C); (8384 11055217 T TA); (8385 11055254 A G); (8386 11055713 A T); (8387 11055735 G
A); (8388 11056136 G A); (8389 11056502 G C); (8390 11056566 A G); (8391 11056717 T C); (8392
11056754 A G); (8393 11057157 C T); (8394 11057379 C T); (8395 11057937 G C); (8396 11058057 G
A); (8397 11058634 AC A); (8398 11058738 A T); (8399 11059118 C T); (8400 11059216 T G); (8401
11059243 A G); (8402 11059334 G A); (8403 11059450 G T); (8404 11059836 C T); (8405 11059931 A
G); (8406 11059939 A C); (8407 11059943 T G); (8408 11060579 A AT); (8409 11061036 A T); (8410
11061556 AT A); (8411 11063547 T A); (8412 11064065 T A); (8413 11064120 G C); (8414 11065185 C
T); (8415 11065578 G A); (8416 11065822 G A); (8417 11067270 A C); (8418 11067362 C CT); (8419
11067500 A G); (8420 11067645 TTTACCC T); (8421 11067974 T C); (8422 11069622 C T); (8423
11069782 G C); (8424 11070504 C T); (8425 11070883 C T); (8426 11070911 A G); (8427 11071345 T
C); (8428 11071525 TA T); (8429 11072006 C T); (8430 11072269 A T); (8431 11072517 A G); (8432
11073525 T G); (8433 11074398 A G); (8434 11074955 G A); (8435 11075092 C G); (8436 11075225 G
A); (8437 11076641 A G); (8438 11076726 G A); (8439 11076958 G A); (8440 11079673 G A); (8441
11079676 T C); (8442 11079688 C T); (8443 11083542 C T); (8444 11083546 G A); (8445 11083550 A
G); (8446 11083680 C T); (8447 11084287 A G); (8448 11084739 A G); (8449 11084943 T C); (8450
11085037 T C); (8451 11085274 A G); (8452 11085598 T C); (8453 11085611 C T); (8454 11085644 G
A); (8455 11085982 G A); (8456 11086010 A G); (8457 11086058 G C); (8458 11086121 T G); (8459
11086312 C A); (8460 11086318 G A); (8461 11086330 G A); (8462 11086335 T C); (8463 11086357 C
T); (8464 11086367 G A); (8465 11086369 C A); (8466 11086382 C G); (8467 11086387 C T); (8468
11086406 C T); (8469 11086408 G A); (8470 11086423 A G); (8471 11086520 C A); (8472 11086524 T
C); (8473 11086539 T C); (8474 11086559 C T); (8475 11086584 C T); (8476 11086616 T C); (8477
11086650 G A); (8478 11086729 G A); (8479 11086838 G A); (8480 11086894 G A); (8481 11087216 A
G); (8482 11087426 A C); (8483 11087452 A G); (8484 11087466 C T); (8485 11087505 C T); (8486
11087599 C T); (8487 11087861 A G); (8488 11087868 A C); (8489 11087946 T G); (8490 11088045 G
A); (8491 11088099 T C); (8492 11088222 T G); (8493 11088385 G T); (8494 11088454 G A); (8495
11088484 C T); (8496 11088879 T C); (8497 11088904 T A); (8498 11089083 T C); (8499 11089298 C
T); (8500 11089351 G A); (8501 11089529 C A); (8502 11089600 A G); (8503 11089784 T C); (8504
11089805 G A); (8505 11089971 GGA G); (8506 11090507 G A); (8507 11090860 T C); (8508 11090866 C
T); (8509 11090889 C T); (8510 11091364 T C); (8511 11091390 C T); (8512 11091452 C T); (8513
11091616 G A); (8514 11091662 A T); (8515 11091877 G A); (8516 11091907 G A); (8517 11092347 T
A); (8518 11092425 TA T); (8519 11093414 C G); (8520 11094154 A G); (8521 11095022 G A); (8522
11095900 C T); (8523 11096228 C G); (8524 11096309 A C); (8525 11096314 T A); (8526 11096609 C
A); (8527 11096987 G C); (8528 11097262 A T); (8529 11097359 G A); (8530 11097488 C A); (8531
11098028 G T); (8532 11098217 T G); (8533 11098253 T TA); (8534 11099085 G C); (8535 11099133 C
A); (8536 11099669 A T); (8537 11099670 C T); (8538 11099951 C T); (8539 11100122 C T); (8540
11100671 A G); (8541 11101252 G C); (8542 11101331 T C); (8543 11102235 T C); (8544 11102290 A
C); (8545 11102518 C G); (8546 11103535 A G); (8547 11103900 G T); (8548 11104265 G A); (8549
11104908 A G); (8550 11104924 A G); (8551 11105794 G A); (8552 11106330 A G); (8553 11106452 C
T); (8554 11106514 G A); (8555 11106634 T C); (8556 11107177 T C); (8557 11107255 T G); (8558
11107554 A C); (8559 11108291 C T); (8560 11108317 C G); (8561 11108796 A G); (8562 11108834 T
C); (8563 11108942 A G); (8564 11108956 A G); (8565 11109021 T C); (8566 11109262 T G); (8567
11110838 T A); (8568 11111038 C A); (8569 11111514 C T); (8570 11112122 A AAAT); (8571 11112303
AC A); (8572 11112486 T TA); (8573 11113539 T G); (8574 11113671 A C); (8575 11114474 T C); (8576
11115052 G A); (8577 11115447 A G); (8578 11115560 T C); (8579 11115984 G A); (8580 11116096 C
T); (8581 11116500 T A); (8582 11116685 A G); (8583 11117567 G A); (8584 11117596 T C); (8585
11117987 G A); (8586 11118382 T A); (8587 11118454 C T); (8588 11118828 T G); (8589 11118856 T
C); (8590 11118909 T C); (8591 11118926 G A); (8592 11118950 G A); (8593 11118956 G A); (8594
11118975 A T); (8595 11118983 C T); (8596 11119199 C T); (8597 11120642 AT A); (8598 11121276 A
G); (8599 11121860 A G); (8600 11122319 TG T); (8601 11124348 C T); (8602 11124508 G A); (8603
11124620 G A); (8604 11124636 C G); (8605 11124693 G C); (8606 11124694 C G); (8607 11124717 C
T); (8608 11124958 T TCA); (8609 11125592 AT A); (8610 11126821 A T); (8611 11126885 A C); (8612
11127087 T G); (8613 11127141 A G); (8614 11127830 G A); (8615 11127979 G GT); (8616 11128159 A
T); (8617 11128485 C T); (8618 11128685 T C); (8619 11128762 C T); (8620 11129873 T TA); (8621
11130166 AAG A); (8622 11130280 T A); (8623 11130317 TA T); (8624 11130459 C A); (8625 11130473 T
C); (8626 11130687 A G); (8627 11132024 TTTC T); (8628 11132028 T C); (8629 11132076 A G); (8630
11132093 G A); (8631 11132131 A G); (8632 11132143 C T); (8633 11132204 G A); (8634 11132225 G
A); (8635 11132814 T C); (8636 11133003 A G); (8637 11133039 T A); (8638 11133087 G A); (8639
11133097 A T); (8640 11133180 A G); (8641 11133286 G A); (8642 11133358 G
GGTTCTGGGCGTGACCAGTCATGCCCA); (8643 11133558 G A); (8644 11133654 T A); (8645 11133782 C
T); (8646 11133825 C T); (8647 11134058 A C); (8648 11134317 G A); (8649 11137543 T TA); (8650
11137599 T C); (8651 11137675 TA T); (8652 11138353 A T); (8653 11138354 A T); (8654 11138847 A
G); (8655 11139091 TA T); (8656 11139536 G A); (8657 11140109 A AT); (8658 11141067 T C); (8659
11141184 AT A); (8660 11141274 T G); (8661 11141557 A T); (8662 11141650 C A); (8663 11143173 A
G); (8664 11145012 T G); (8665 11145350 C T); (8666 11145535 C CA); (8667 11145573 A G); (8668
11145655 A G); (8669 11145801 G A); (8670 11145898 C A); (8671 11146173 C T); (8672 11146297 C
T); (8673 11146372 T C); (8674 11146443 G T); (8675 11146447 G A); (8676 11146517 T C); (8677
11146598 C G); (8678 11146643 C A); (8679 11146719 A T); (8680 11146812 C T); (8681 11146821 C
A); (8682 11146828 G C); (8683 11146837 A C); (8684 11146873 T A); (8685 11146891 T C); (8686
11147195 A T); (8687 11147319 A G); (8688 11147402 G C); (8689 11147487 T C); (8690 11147713 C
T); (8691 11147825 T A); (8692 11147837 A T); (8693 11147844 AATAC A); (8694 11147848 A T); (8695
11147936 T G); (8696 11147946 A C); (8697 11147968 T C); (8698 11148013 G C); (8699 11148105 T
C); (8700 11148212 C CTA); (8701 11148394 C T); (8702 11148416 C T); (8703 11148454 T A); (8704
11148692 C T); (8705 11148707 G T); (8706 11148713 A G); (8707 11148740 A G); (8708 11148780 G
C); (8709 11148785 A T); (8710 11148789 A G); (8711 11148839 C A); (8712 11148853 A G); (8713
11148880 T G); (8714 11149005 GA G); (8715 11149023 A G); (8716 11149228 C T); (8717 11149324 A
G); (8718 11149435 A T); (8719 11149472 T C); (8720 11149563 G A); (8721 11149564 G T); (8722
11149634 A ATAAAT); (8723 11149724 T TCATG); (8724 11149807 G A); (8725 11149853 A T); (8726
11149981 A G); (8727 11150069 C A); (8728 11150082 C T); (8729 11150134 G A); (8730 11150142 A
ATCT); (8731 11150220 A C); (8732 11150517 G A); (8733 11150552 CAT C); (8734 11150771 G C); (8735
11150939 A C); (8736 11151016 A T); (8737 11151208 T A); (8738 11151332 G A); (8739 11151369 T
C); (8740 11151593 C A); (8741 11151594 A C); (8742 11151667 T TTTTAATAATA); (8743 11151845 C
T); (8744 11151857 A AT); (8745 11151953 A T); (8746 11152013 C T); (8747 11152017 A G); (8748
11152020 C A); (8749 11152089 A AT); (8750 11152138 A G); (8751 11152149 T C); (8752 11152197 G
A); (8753 11153178 T A); (8754 11153255 T A); (8755 11153406 C T); (8756 11153624 T TA); (8757
11153886 C T); (8758 11153911 C T); (8759 11153925 G T); (8760 11153950 C A); (8761 11154009 T
C); (8762 11154012 A T); (8763 11154078 C G); (8764 11154182 A T); (8765 11154362 CA C); (8766
11154603 C G); (8767 11154670 C G); (8768 11154791 G A); (8769 11154849 T TA); (8770 11154881 C
T); (8771 11154941 A C); (8772 11154988 C T); (8773 11155153 C A); (8774 11155231 C T); (8775
11155282 C T); (8776 11155292 G GA); (8777 11155556 GTCTT G); (8778 11155568 G A); (8779
11155571 G A); (8780 11155576 A C); (8781 11155582 T G); (8782 11155643 A G); (8783 11155719 G
T); (8784 11155736 T A); (8785 11155746 T C); (8786 11155752 T C); (8787 11155794 T TTA); (8788
11155804 T C); (8789 11155883 C T); (8790 11155930 T G); (8791 11156053 T A); (8792 11156054 T
C); (8793 11156058 A T); (8794 11156067 T C); (8795 11156231 C T); (8796 11156273 T C); (8797
11156311 A T); (8798 11156456 G A); (8799 11156600 G T); (8800 11156748 G A); (8801 11156903 T
C); (8802 11156939 G A); (8803 11159855 G A); (8804 11165309 C T); (8805 11165343 C T); (8806
11166336 C A); (8807 11168140 T C); (8808 11168169 G A); (8809 11168342 T G); (8810 11168574 T
A); (8811 11168736 A T); (8812 11168801 A ATT); (8813 11168940 C T); (8814 11168985 C T); (8815
11169073 A G); (8816 11169199 A G); (8817 11169253 G A); (8818 11169265 T G); (8819 11169521 G
A); (8820 11169558 T C); (8821 11169602 C A); (8822 11169671 T C); (8823 11169791 G A); (8824
11169795 T A); (8825 11170001 G A); (8826 11170075 C T); (8827 11170501 T A); (8828 11170516 T
C); (8829 11170520 A G); (8830 11170805 T G); (8831 11170847 C T); (8832 11171094 G A); (8833
11171124 T C); (8834 11171143 T C); (8835 11171315 C T); (8836 11171364 C T); (8837 11171396 T
C); (8838 11171419 G A); (8839 11171424 T C); (8840 11171439 G A); (8841 11171440 T C); (8842
11171441 G A); (8843 11171452 C T); (8844 11171515 T A); (8845 11171520 G
GCCACACCCCACGCGACCCGCA); (8846 11171528 T C); (8847 11171563 T C); (8848 11171571 G A); (8849
11171573 G A); (8850 11171880 G A); (8851 11171899 A G); (8852 11171999 C T); (8853 11172063 C
T); (8854 11172126 T C); (8855 11172217 C T); (8856 11172248 A G); (8857 11172266 T C); (8858
11172280 T C); (8859 11172340 A C); (8860 11172412 G A); (8861 11172522 G T); (8862 11172582 T
C); (8863 11172625 A G); (8864 11172886 G A); (8865 11172893 T C); (8866 11172922 C T); (8867
11172923 A G); (8868 11172925 C T); (8869 11173041 A G); (8870 11173064 G A); (8871 11173128 A
G); (8872 11173238 T C); (8873 11173249 A G); (8874 11173321 G A); (8875 11173368 A G); (8876
11173382 G A); (8877 11173390 C T); (8878 11173407 A G); (8879 11173417 C T); (8880 11173451 G
A); (8881 11173610 A C); (8882 11173632 C A); (8883 11173708 G A); (8884 11173712 A C); (8885
11173737 A T); (8886 11173757 G A); (8887 11173760 T C); (8888 11173774 T C); (8889 11173794 G
A); (8890 11173892 C T); (8891 11173929 C T); (8892 11173997 AC A); (8893 11174060 T C); (8894
11174123 C T); (8895 11174208 C T); (8896 11174215 T C); (8897 11174230 T G); (8898 11174265 C
T); (8899 11174324 A T); (8900 11174393 A G); (8901 11174396 T C); (8902 11174433 A G); (8903
11174486 C T); (8904 11174493 G A); (8905 11174500 G A); (8906 11174526 G A); (8907 11174549 T
C); (8908 11174568 A C); (8909 11174585 C T); (8910 11174587 G C); (8911 11174640 G C); (8912
11174900 C A); (8913 11175056 T TAA); (8914 11175346 G T); (8915 11175366 T G); (8916 11175708 T
A); (8917 11175716 C T); (8918 11175980 CTTGATAA C); (8919 11176082 T TA); (8920 11176122 C
T); (8921 11176139 T C); (8922 11176177 A G); (8923 11176198 T C); (8924 11176221 G T); (8925
11176229 T C); (8926 11176235 G A); (8927 11176376 T C); (8928 11176381 C T); (8929 11176426 T
C); (8930 11176451 TA T); (8931 11176724 A G); (8932 11176727 C T); (8933 11176775 G A); (8934
11176795 A C); (8935 11176820 A T); (8936 11176868 G T); (8937 11176983 AT A); (8938 11179975 G
A); (8939 11182427 G C); (8940 11184301 C G); (8941 11185723 G GA); (8942 11187456 C T); (8943
11187731 T C); (8944 11187885 A G); (8945 11189940 G A); (8946 11190480 G A); (8947 11190913 G
T); (8948 11191395 AACCCTAGCCAAACCCTAAACCCAAG A); (8949 11192205 A G); (8950 11192623 T
C); (8951 11193267 G T); (8952 11194149 T C); (8953 11194267 A G); (8954 11196000 T C); (8955
11199054 C T); (8956 11199997 C T); (8957 11200230 C T); (8958 11204201 C G); (8959 11204316 C
G); (8960 11205269 C A); (8961 11205960 C T); (8962 11206012 T C); (8963 11206255 C A); (8964
11206969 T C); (8965 11207702 C T); (8966 11208285 C T); (8967 11208792 C A); (8968 11210245 C
T); (8969 11213151 G T); (8970 11213923 T G); (8971 11214045 C A); (8972 11214224 A G); (8973
11214613 G A); (8974 11220652 G A); (8975 11222229 CT C); (8976 11223236 A T); (8977 11232861 C
T); (8978 11233265 ATTTG A); (8979 11235140 T G); (8980 11237623 G A); (8981 11237999 C
CTGTATATTCGTTTGTT); (8982 11238382 A AGAATT); (8983 11238602 C T); (8984 11240062 C
CAATT); (8985 11244847 G A); (8986 11245425 G A); (8987 11246436 G A); (8988 11248668 G A); (8989
11250396 C T); (8990 11259444 A G); (8991 11259504 C A); (8992 11259746 C T); (8993 11262160 G
A); (8994 11262504 C T); (8995 11263748 G C); (8996 11264607 G C); (8997 11264723 G A); (8998
11265269 C T); (8999 11266531 A G); (9000 11268476 CT C); (9001 11268740 G A); (9002 11270024 C
T); (9003 11272869 C T); (9004 11273636 G T); (9005 11275077 T A); (9006 11275996 A T); (9007
11276441 C T); (9008 11276682 A G); (9009 11276972 C T); (9010 11284233 G C); (9011 11285211 C
G); (9012 11292810 T C); (9013 11294172 C T); (9014 11296445 G A); (9015 11298325 ATT A); (9016
11300916 C A); (9017 11304912 A C); (9018 11308169 G A); (9019 11309821 AT A); (9020 11310319 C
T); (9021 11313483 C T); (9022 11313631 C T); (9023 11314276 G T); (9024 11315017 G A); (9025
11317267 G A); (9026 11317499 G A); (9027 11317523 T C); (9028 11317551 T
TACACACACACACACACACACACACACACAC); (9029 11320442 A T); (9030 11326616 G A); (9031
11327699 G A); (9032 11334471 C T); (9033 11334553 G A); (9034 11337078 C T); (9035 11337081 G
A); (9036 11338851 T C); (9037 11338857 C A); (9038 11338871 A C); (9039 11338880 A C); (9040
11338885 A T); (9041 11338897 C CAGAAAGCCAACTGGTAGGTACTGTTGT); (9042 11344519 C T); (9043
11349758 G A); (9044 11349981 A C); (9045 11350811 G A); (9046 11352618 G GT); (9047 11353236 C
T); (9048 11356557 G A); (9049 11358294 C T); (9050 11359657 G A); (9051 11359964 C T); (9052
11360321 C T); (9053 11365604 C A); (9054 11366044 A C); (9055 11366146 C T); (9056 11366665 T
A); (9057 11367278 G A); (9058 11373930 T G); (9059 11375730 T A); (9060 11377911 GT G); (9061
11382090 A G); (9062 11382733 C T); (9063 11383132 C T); (9064 11384237 A C); (9065 11385169 A
G); (9066 11386745 T C); (9067 11387952 T C); (9068 11388076 A T); (9069 11388762 G C); (9070
11390287 C T); (9071 11390450 C CT); (9072 11391526 T C); (9073 11393111 G A); (9074 11395064 T
G); (9075 11395102 A G); (9076 11395350 A G); (9077 11395943 G A); (9078 11396356 T C); (9079
11397375 T G); (9080 11397681 G A); (9081 11397964 T G); (9082 11398374 C T); (9083 11398544 G
A); (9084 11398617 C T); (9085 11399062 G T); (9086 11399482 T C); (9087 11400424 T A); (9088
11400735 A G); (9089 11401048 A C); (9090 11401654 A G); (9091 11401763 C G); (9092 11403044 A
G); (9093 11403394 A G); (9094 11405499 G A); (9095 11407301 G A); (9096 11408561 C T); (9097
11409203 G A); (9098 11409432 A C); (9099 11410038 C T); (9100 11410756 C G); (9101 11411203 T
C); (9102 11411595 A G); (9103 11411824 A G); (9104 11412602 A C); (9105 11412623
GACTCTTGTTCCCAAACCTAA G); (9106 11413088 T C); (9107 11415387 A G); (9108 11415980 G A); (9109
11416004 GT G); (9110 11416627 AT A); (9111 11418702 T C); (9112 11418901 G A); (9113 11419488 T
C); (9114 11421048 G A); (9115 11421713 C T); (9116 11421970 C G); (9117 11422046 G C); (9118
11427270 T C); (9119 11430287 T C); (9120 11431446 C A); (9121 11434473 C T); (9122 11436127 A
G); (9123 11436183 C CT); (9124 11436931 A T); (9125 11436934 G GT); (9126 11438200 A C); (9127
11439913 C T); (9128 11440881 T C); (9129 11445019 A G); (9130 11446414 G A); (9131 11447065 C
T); (9132 11449675 A C); (9133 11450464 C T); (9134 11451149 G A); (9135 11451834 G A); (9136
11452446 T C); (9137 11456001 ATTT A); (9138 11456733 G A); (9139 11458682 G A); (9140 11458940 G
C); (9141 11459012 C G); (9142 11459385 C T); (9143 11461456 T C); (9144 11461464 G A); (9145
11461621 CA C); (9146 11462161 A C); (9147 11462713 G C); (9148 11462743 C A); (9149 11462761 C
T); (9150 11463273 G A); (9151 11465948 G A); (9152 11468213 A G); (9153 11468616 C T); (9154
11468761 C T); (9155 11469344 C T); (9156 11470514 T C); (9157 11472501 T C); (9158 11472571 G
A); (9159 11473346 T C); (9160 11474634 A G); (9161 11475022 C T); (9162 11475914 A C); (9163
11476005 G T); (9164 11476419 G A); (9165 11477006 T A); (9166 11477811 T C); (9167 11477851 G
A); (9168 11478214 G A); (9169 11480220 A C); (9170 11481113 AGTTAT A); (9171 11484242 A C); (9172
11485290 A G); (9173 11485836 A T); (9174 11485996 A G); (9175 11487159 C T); (9176 11491528 G
A); (9177 11491950 A T); (9178 11492473 G A); (9179 11494622 C A); (9180 11495213 G C); (9181
11495762 T C); (9182 11496504 G A); (9183 11497739 G A); (9184 11502322 T A); (9185 11502332 G
A); (9186 11502363 C T); (9187 11502490 G A); (9188 11502597 A G); (9189 11508006 C T); (9190
11511062 T TACAACA); (9191 11511305 C A); (9192 11511310 C A); (9193 11512366 T A); (9194
11513744 A C); (9195 11514532 G C); (9196 11514931 T C); (9197 11516365 C T); (9198 11517130 C
T); (9199 11517709 C G); (9200 11518236 C T); (9201 11518391 T C); (9202 11519922 G A); (9203
11519949 G A); (9204 11519988 G A); (9205 11520201 A G); (9206 11520511 T C); (9207 11520584 C
T); (9208 11520622 C T); (9209 11522522 A G); (9210 11523131 G A); (9211 11523181 C A); (9212
11524149 C T); (9213 11524612 G A); (9214 11524730 C T); (9215 11525304 G A); (9216 11525437 C
T); (9217 11525635 C T); (9218 11525797 A G); (9219 11526549 A G); (9220 11526856 C A); (9221
11527556 C A); (9222 11527680 G A); (9223 11527856 C T); (9224 11528229 T C); (9225 11528259 T
C); (9226 11530067 GT G); (9227 11530107 T C); (9228 11534016 T G); (9229 11536596 TA T); (9230
11538608 G A); (9231 11541271 A G); (9232 11542888 TA T); (9233 11543667 C G); (9234 11544531 C
G); (9235 11545884 T C); (9236 11546074 G C); (9237 11549694 C T); (9238 11549896 C A); (9239
11550082 G A); (9240 11550920 C T); (9241 11551265 C T); (9242 11552052 C T); (9243 11552781 G
T); (9244 11552877 G T); (9245 11552908 C T); (9246 11553311 T C); (9247 11554007 C T); (9248
11554066 C T); (9249 11561263 C T); (9250 11562622 T C); (9251 11567081 G A); (9252 11567209 C
T); (9253 11567635 GC G); (9254 11568082 G A); (9255 11568600 G A); (9256 11568858 C G); (9257
11569054 G A); (9258 11570697 C T); (9259 11573565 C T); (9260 11574556 T C); (9261 11576001 C
T); (9262 11577167 G C); (9263 11578518 G A); (9264 11578762 C T); (9265 11579396 C T); (9266
11579821 T C); (9267 11580900 C T); (9268 11582112 C T); (9269 11585407 G A); (9270 11586054 T
C); (9271 11587470 A G); (9272 11589007 A G); (9273 11589839 T G); (9274 11589981 G A); (9275
11590961 T C); (9276 11590983 C T); (9277 11593127 G C); (9278 11597777 C T); (9279 11598179 A
G); (9280 11598224 C T); (9281 11598773 T G); (9282 11598796 C T); (9283 11598828 A G); (9284
11598926 T C); (9285 11598929 G A); (9286 11598945 A C); (9287 11598981 CCAG C); (9288 11599987 T
C); (9289 11600050 A G); (9290 11600177 G A); (9291 11600341 G A); (9292 11602805 G C); (9293
11602983 T C); (9294 11602985 A G); (9295 11604060 GC G); (9296 11604123 A C); (9297 11604127 G
A); (9298 11604218 TCTCTCTTCC T); (9299 11604399 A G); (9300 11604696 A G); (9301 11604747 C
T); (9302 11604749 T C); (9303 11604762 A T); (9304 11606561 G A); (9305 11609808 C T); (9306
11610300 C T); (9307 11610964 C T); (9308 11614303 T G); (9309 11615339 CA C); (9310 11615932
TTTGGTACTGGA T); (9311 11616028 G A); (9312 11620381 C T); (9313 11621400 A G); (9314 11622176 C
T); (9315 11623132 A G); (9316 11623469 G A); (9317 11623588 A G); (9318 11623613 T C); (9319
11623687 C T); (9320 11623703 T C); (9321 11624735 GT G); (9322 11624823 G A); (9323 11625018 G
A); (9324 11625032 T G); (9325 11625901 C T); (9326 11625914 A G); (9327 11626313 C T); (9328
11626459 T C); (9329 11626763 T C); (9330 11626808 G T); (9331 11627475 C T); (9332 11628798 C
G); (9333 11629519 A C); (9334 11629543 A G); (9335 11629676 A G); (9336 11629766 A G); (9337
11629771 A G); (9338 11630102 C G); (9339 11630148 A G); (9340 11630295 C T); (9341 11630321 T
C); (9342 11630385 T C); (9343 11630446 T C); (9344 11630465 A G); (9345 11630536 G T); (9346
11630744 T A); (9347 11631000 C A); (9348 11631539 C T); (9349 11632047 G A); (9350 11632183 T
G); (9351 11632399 A G); (9352 11632443 C A); (9353 11632730 T C); (9354 11632778 T C); (9355
11633022 G A); (9356 11633068 C G); (9357 11633151 C T); (9358 11633333 T C); (9359 11633381 T
C); (9360 11633403 T C); (9361 11633467 T C); (9362 11633645 T G); (9363 11634520 G A); (9364
11634540 T C); (9365 11634630 C T); (9366 11635220 G A); (9367 11635262 T C); (9368 11636264 A
G); (9369 11636485 G A); (9370 11636696 C A); (9371 11636823 C T); (9372 11636847 C T); (9373
11636895 G T); (9374 11636973 T C); (9375 11637063 C A); (9376 11638076 C T); (9377 11638141 T
C); (9378 11638176 A T); (9379 11638195 A G); (9380 11638269 C T); (9381 11638371 G A); (9382
11638393 A T); (9383 11638459 A G); (9384 11638562 C A); (9385 11638662 T C); (9386 11638702 A
C); (9387 11638873 G C); (9388 11638884 C T); (9389 11638927 G A); (9390 11638985 A G); (9391
11638994 C T); (9392 11639051 A T); (9393 11639140 C T); (9394 11639161 T C); (9395 11639164 C
T); (9396 11639178 C T); (9397 11639181 C T); (9398 11639196 T A); (9399 11639202 A G); (9400
11639222 A G); (9401 11639225 G T); (9402 11639261 T C); (9403 11639266 A C); (9404 11639268 T
A); (9405 11641804 A G); (9406 11641812 T G); (9407 11641831 C T); (9408 11641835 G A); (9409
11641841 G T); (9410 11641891 A G); (9411 11641930 C T); (9412 11642048 T A); (9413 11642070 T
C); (9414 11642105 G A); (9415 11642110 A G); (9416 11642118 C T); (9417 11642140 G A); (9418
11642144 A G); (9419 11642163 T C); (9420 11642165 T A); (9421 11642204 A C); (9422 11642241 C
T); (9423 11642255 T G); (9424 11642353 TG T); (9425 11642470 G A); (9426 11642519 C T); (9427
11642916 C T); (9428 11642918 C A); (9429 11642920 T A); (9430 11642939 G A); (9431 11642947 TC
T); (9432 11642948 C T); (9433 11643009 C T); (9434 11643055 G A); (9435 11643095 T C); (9436
11643097 TA T); (9437 11643099 C T); (9438 11643530 A T); (9439 11643841 C A); (9440 11643851 C
T); (9441 11643859 T A); (9442 11643866 T C); (9443 11643986 C T); (9444 11644028 T C); (9445
11644296 T C); (9446 11644299 C A); (9447 11644341 T G); (9448 11644433 C T); (9449 11644491 A
C); (9450 11644505 A G); (9451 11644531 C CT); (9452 11644680 G A); (9453 11644692 C A); (9454
11644720 C A); (9455 11644723 T C); (9456 11644841 G A); (9457 11645052 A T); (9458 11645062 T
A); (9459 11645117 G C); (9460 11645128 C T); (9461 11645214 C T); (9462 11645229 A G); (9463
11645234 C A); (9464 11645235 T A); (9465 11645237 C T); (9466 11645243 A G); (9467 11645251 A
G); (9468 11645295 A T); (9469 11645315 C T); (9470 11645384 C T); (9471 11645405 T C); (9472
11645422 C T); (9473 11645450 G A); (9474 11645492 T C); (9475 11645497 A G); (9476 11645498 A
G); (9477 11645505 T C); (9478 11645512 T C); (9479 11645761 A G); (9480 11645775 G GT); (9481
11645785 A C); (9482 11645796 C T); (9483 11645872 A G); (9484 11645990 A G); (9485 11646094 A
G); (9486 11646124 T A); (9487 11646128 C CT); (9488 11646134 A G); (9489 11646138 A G); (9490
11646751 A C); (9491 11646757 C T); (9492 11646817 G A); (9493 11646825 T C); (9494 11646839 G
A); (9495 11648075 C T); (9496 11648316 G A); (9497 11648474 G C); (9498 11648663 G A); (9499
11648854 A G); (9500 11649213 C A); (9501 11649509 C T); (9502 11650581 G T); (9503 11650583 C
CTT); (9504 11650940 G A); (9505 11650956 G A); (9506 11651098 A G); (9507 11651245 T C); (9508
11651816 T G); (9509 11652054 C T); (9510 11652129 G A); (9511 11652168 G A); (9512 11652246 A
G); (9513 11654007 T G); (9514 11654442 A G); (9515 11655996 G A); (9516 11656819 C A); (9517
11656850 G A); (9518 11657070 T A); (9519 11659153 GTAA G); (9520 11659166 G C); (9521 11659284
C T); (9522 11659295 T C); (9523 11659401 A C); (9524 11659573 A G); (9525 11659884 G A); (9526
11659981 T C); (9527 11660125 T TA); (9528 11660160 G A); (9529 11660346 G A); (9530 11660526 G
A); (9531 11660634 C A); (9532 11660707 A C); (9533 11660709 A T); (9534 11660711 T C); (9535
11660937 T G); (9536 11661102 G T); (9537 11661184 A G); (9538 11662329 T TA); (9539 11663370 A
G); (9540 11663630 C T); (9541 11664378 T G); (9542 11664448 T C); (9543 11664792 A C); (9544
11664797 C G); (9545 11664802 C G); (9546 11665853 T A); (9547 11665960 T C); (9548 11665976 A
C); (9549 11666017 A T); (9550 11666137 G A); (9551 11666699 C G); (9552 11666832 T C); (9553
11666856 GA G); (9554 11666946 A G); (9555 11666950 C G); (9556 11667153 G GA); (9557 11667358 T
A); (9558 11667567 C T); (9559 11667898 G A); (9560 11668395 C T); (9561 11668583 C T); (9562
11668851 G C); (9563 11669657 C T); (9564 11669715 C T); (9565 11669766 A AC); (9566 11670061 G
A); (9567 11670130 A G); (9568 11670141 G A); (9569 11670176 A G); (9570 11670284 C T); (9571
11670356 G A); (9572 11670368 C A); (9573 11670411 A T); (9574 11670655 A G); (9575 11670859 G
A); (9576 11670879 A G); (9577 11670934 T C); (9578 11670999 C A); (9579 11671139 T A); (9580
11671631 C T); (9581 11672014 A G); (9582 11672734 T C); (9583 11672785 T C); (9584 11672887 A
G); (9585 11674169 C T); (9586 11674193 G A); (9587 11674275 C G); (9588 11674370 T C); (9589
11674397 A G); (9590 11674439 C T); (9591 11674462 G A); (9592 11674790 G A); (9593 11674795 T
G); (9594 11674917 T C); (9595 11674997 T C); (9596 11675067 T C); (9597 11675275 C T); (9598
11675289 C CGTGGGAGCCCACGCTTGGAGT); (9599 11675291 G GGCGTGGGAGCCCACGCTTGGA); (9600
11675303 A G); (9601 11675511 C T); (9602 11675686 T C); (9603 11675729 T C); (9604 11675802 C
T); (9605 11675888 A C); (9606 11675921 G A); (9607 11675965 A G); (9608 11675970 GC G); (9609
11676103 T C); (9610 11676118 G A); (9611 11676534 A C); (9612 11676838 T G); (9613 11676877 A
G); (9614 11677106 C T); (9615 11677146 T C); (9616 11677592 A G); (9617 11677618
TAAAACCTTGTTTATC T); (9618 11677628 G A); (9619 11677743 G A); (9620 11677744 C T); (9621
11677949 T G); (9622 11678093 C T); (9623 11678206 T G); (9624 11678412 G A); (9625 11678421 T
C); (9626 11678430 C T); (9627 11678528 AGTT A); (9628 11678745 A G); (9629 11678787 A G); (9630
11678840 T C); (9631 11678894 T G); (9632 11678903 G A); (9633 11679053 C T); (9634 11679137 T
A); (9635 11679174 C T); (9636 11679567 T G); (9637 11679865 C T); (9638 11679875 A G); (9639
11680033 T A); (9640 11680137 A G); (9641 11680231 G A); (9642 11680241 G A); (9643 11680392 C
T); (9644 11680467 A G); (9645 11680504 G A); (9646 11680625 G A); (9647 11680814 G C); (9648
11680933 C T); (9649 11680964 A C); (9650 11681198 T C); (9651 11681222 A AT); (9652 11681298 G
A); (9653 11681968 G A); (9654 11682012 C T); (9655 11682058 C A); (9656 11682141 T G); (9657
11682383 A G); (9658 11682460 C A); (9659 11682631 A ATACGT); (9660 11682755 G T); (9661
11683012 C T); (9662 11683762 C T); (9663 11684349 C T); (9664 11684389 G A); (9665 11684570 G
A); (9666 11684861 C T); (9667 11685079 A C); (9668 11685125 T C); (9669 11685315 G A); (9670
11685422 A G); (9671 11685845 T A); (9672 11685861 C A); (9673 11685881 T C); (9674 11685891 G
A); (9675 11685981 T C); (9676 11685993 G C); (9677 11686048 G A); (9678 11686253 T G); (9679
11686284 A G); (9680 11686369 T C); (9681 11686627 C T); (9682 11687136 T C); (9683 11687205 G
T); (9684 11687219 T A); (9685 11687388 C T); (9686 11687406 T TA); (9687 11687487 G A); (9688
11687611 T TG); (9689 11687739 T G); (9690 11687837 T C); (9691 11687919 G A); (9692 11688006 T
C); (9693 11688880 T C); (9694 11689220 C A); (9695 11689274 T C); (9696 11689482 G C); (9697
11689708 A C); (9698 11689848 G A); (9699 11689944 G C); (9700 11690314 T G); (9701 11690422 A
G); (9702 11690638 C T); (9703 11690837 A T); (9704 11690933 T A); (9705 11691166 C A); (9706
11691394 A T); (9707 11691459 C A); (9708 11691660 G A); (9709 11691897 G A); (9710 11691936 C
T); (9711 11691979 A G); (9712 11693318 T A); (9713 11693326 C T); (9714 11693380 C A); (9715
11693405 C A); (9716 11693506 A G); (9717 11693740 C T); (9718 11693748 G T); (9719 11694299 T
C); (9720 11694321 A T); (9721 11694409 T G); (9722 11694466 AT A); (9723 11694507 A C); (9724
11694554 T C); (9725 11694562 T TGATGGCGCC); (9726 11694615 A C); (9727 11694667 G A); (9728
11694691 G T); (9729 11694848 A G); (9730 11694955 T C); (9731 11694983 A G); (9732 11695149 C
T); (9733 11695155 C T); (9734 11695621 G A); (9735 11695713 T C); (9736 11696008 A G); (9737
11696283 C T); (9738 11696317 C T); (9739 11696318 A G); (9740 11696391 T A); (9741 11696455 T
C); (9742 11696509 C T); (9743 11696818 G A); (9744 11696925 A C); (9745 11697555 A G); (9746
11697572 G A); (9747 11697631 C G); (9748 11697728 C A); (9749 11697836 T C); (9750 11697876 A
G); (9751 11698371 A T); (9752 11698709 T C); (9753 11698861 T C); (9754 11698995 A G); (9755
11699469 T A); (9756 11699476 A C); (9757 11699714 G C); (9758 11700099 T A); (9759 11700132 G
A); (9760 11700174 G A); (9761 11700415 A C); (9762 11700504 C T); (9763 11700520 C T); (9764
11700723 T C); (9765 11700815 C G); (9766 11700892 A C); (9767 11700991 C A); (9768 11701112 G
A); (9769 11701518 G T); (9770 11701962 G A); (9771 11702186 A C); (9772 11702298 C T); (9773
11702426 G A); (9774 11702615 T C); (9775 11702757 T C); (9776 11702758 G A); (9777 11702762 A
C); (9778 11702799 T C); (9779 11702847 A AC); (9780 11702853 A T); (9781 11702914 A G); (9782
11703409 A G); (9783 11703544 A G); (9784 11703653 G T); (9785 11703689 T G); (9786 11703971 A
G); (9787 11704070 C G); (9788 11704112 G A); (9789 11704532 T C); (9790 11704740 G A); (9791
11704789 G A); (9792 11704856 C T); (9793 11705003 A G); (9794 11705299 G A); (9795 11705530 C
T); (9796 11705567 G A); (9797 11705693 A C); (9798 11705960 A G); (9799 11706081 C T); (9800
11706126 T C); (9801 11706683 CT C); (9802 11706918 G A); (9803 11707110 T C); (9804 11707119 G
A); (9805 11707139 T A); (9806 11707390 T TA); (9807 11707501 G A); (9808 11707582 T C); (9809
11707774 A T); (9810 11707827 T C); (9811 11708050 C T); (9812 11708113 G A); (9813 11708921 A
C); (9814 11709049 T G); (9815 11709310 G A); (9816 11709334 C T); (9817 11709497 A G); (9818
11709550 A G); (9819 11709562 T C); (9820 11709648 G C); (9821 11710373 C T); (9822 11710384 T
C); (9823 11710395 G GA); (9824 11710450 G A); (9825 11710950 A G); (9826 11711321 A G); (9827
11711695 A G); (9828 11711706 A G); (9829 11711777 T TA); (9830 11711786 A T); (9831 11711859 G
A); (9832 11712940 A G); (9833 11713049 C T); (9834 11713114 T C); (9835 11713137 A C); (9836
11713461 C A); (9837 11713881 A G); (9838 11714530 A G); (9839 11714665 T C); (9840 11714676 A
G); (9841 11715074 G A); (9842 11716291 G A); (9843 11716722 T C); (9844 11716813 A G); (9845
11717295 TACATAC T); (9846 11717351 G A); (9847 11717594 A G); (9848 11717742 T C); (9849
11718097 T A); (9850 11718098 T C); (9851 11718449 G A); (9852 11718587 T C); (9853 11718685 A
G); (9854 11718793 A G); (9855 11719143 C A); (9856 11719223 A T); (9857 11719426 G A); (9858
11719725 C T); (9859 11720039 T C); (9860 11720385 C T); (9861 11720393 A C); (9862 11720400 A
G); (9863 11720405 T A); (9864 11720421 G A); (9865 11720426 A G); (9866 11720440 C A); (9867
11720443 A T); (9868 11720742 T A); (9869 11720994 A G); (9870 11721038 G C); (9871 11721090 T
C); (9872 11721097 C T); (9873 11721157 A G); (9874 11721478 T C); (9875 11721480 G A); (9876
11722085 C T); (9877 11722450 TA T); (9878 11722685 A AT); (9879 11722733 A G); (9880 11722973 T
C); (9881 11723190 G GA); (9882 11723305 AT A); (9883 11723413 T TA); (9884 11723552 T A); (9885
11723955 T G); (9886 11724337 T A); (9887 11724513 C T); (9888 11724626 C A); (9889 11724752 G
T); (9890 11724775 A G); (9891 11724957 G A); (9892 11725003 G A); (9893 11725005 A G); (9894
11725007 G A); (9895 11725089 A G); (9896 11725106 G A); (9897 11725116 A C); (9898 11725151 C
T); (9899 11725254 A G); (9900 11725303 C T); (9901 11725331 A G); (9902 11725376 G A); (9903
11725837 A G); (9904 11726075 G A); (9905 11726138 C T); (9906 11726334 G A); (9907 11726450 G
A); (9908 11726532 C T); (9909 11726937 A G); (9910 11727255 A G); (9911 11727296 C A); (9912
11727317 G A); (9913 11727438 T C); (9914 11727841 C T); (9915 11727852 A C); (9916 11728152 G
A); (9917 11728419 G GT); (9918 11728743 T C); (9919 11728802 C G); (9920 11729228 C
CTAGGGTT); (9921 11729395 A AGTTTAGGGTTTGG); (9922 11729936 G A); (9923 11729939 G A); (9924
11730011 T G); (9925 11730019 A G); (9926 11730057 A G); (9927 11730082 A G); (9928 11730242 T
G); (9929 11730302 G C); (9930 11730444 C A); (9931 11730585 T C); (9932 11730733 A G); (9933
11730863 T TA); (9934 11730912 C T); (9935 11732397 C A); (9936 11732528 G T); (9937 11733442 G
A); (9938 11734841 G A); (9939 11735173 C T); (9940 11735562 A G); (9941 11735599 A G); (9942
11735908 A G); (9943 11735934 A C); (9944 11735955 G A); (9945 11736203 C A); (9946 11736388 T
C); (9947 11736402 A T); (9948 11736747 T C); (9949 11736753 C T); (9950 11736758 C G); (9951
11736861 T G); (9952 11737500 C T); (9953 11737591 T C); (9954 11737772 C A); (9955 11737825 A
C); (9956 11738056 T C); (9957 11738066 A G); (9958 11738277 G C); (9959 11738367 C T); (9960
11738497 A G); (9961 11738923 C T); (9962 11739275 G A); (9963 11739280 G GAA); (9964 11739491 C
T); (9965 11739567 G A); (9966 11739641 T C); (9967 11739690 A G); (9968 11739731 G A); (9969
11739830 G A); (9970 11739847 T C); (9971 11739909 A C); (9972 11739999 C T); (9973 11740058 G
A); (9974 11740096 C T); (9975 11740377 A C); (9976 11740506 T C); (9977 11740758 T C); (9978
11740868 A C); (9979 11741011 G A); (9980 11741057 G A); (9981 11741203 G A); (9982 11741581 C
T); (9983 11741952 T A); (9984 11742099 A G); (9985 11743027 A G); (9986 11743180 G A); (9987
11743260 A T); (9988 11743276 A AG); (9989 11743336 A G); (9990 11743411 T G); (9991 11743928 C
T); (9992 11744496 A AAC); (9993 11744724 A G); (9994 11744939 T C); (9995 11744941 A T); (9996
11745361 G A); (9997 11745363 TG T); (9998 11745794 G A); (9999 11745837 A G); (10000 11745945 G
A); (10001 11746316 A G); (10002 11746342 C G); (10003 11746461 C A); (10004 11746482 A G); (10005
11746574 T C); (10006 11746701 C A); (10007 11746974 G T); (10008 11747030 A G); (10009 11747237
A G); (10010 11747270 T C); (10011 11747328 AAAAG A); (10012 11747337 A G); (10013 11747931 C
T); (10014 11748791 T A); (10015 11749006 GT G); (10016 11749533 T TTA); (10017 11749922
ATATATATATATATATAT A); (10018 11750787 T G); (10019 11751088 G A); (10020 11751178 G
A); (10021 11751561 T G); (10022 11753273 GA G); (10023 11754390 G T); (10024 11754485 G
A); (10025 11754779 T TA); (10026 11754905 C T); (10027 11755092 A C); (10028 11755834 T A); (10029
11756398 G A); (10030 11756434 A G); (10031 11756585 T G); (10032 11756714 C G); (10033 11756905
T C); (10034 11757262 T C); (10035 11757439 G A); (10036 11757467 C T); (10037 11757552 C G); (10038
11757635 G A); (10039 11757643 G A); (10040 11757764 C T); (10041 11758021 G A); (10042 11758228
A G); (10043 11758741 G A); (10044 11758796 A G); (10045 11758917 A G); (10046 11758927 C
T); (10047 11759081 G A); (10048 11759914 C A); (10049 11760665 G A); (10050 11763598 G A); (10051
11764485 T C); (10052 11764496 G A); (10053 11764509 C T); (10054 11764511 G A); (10055 11766717
C T); (10056 11766754 T C); (10057 11766804 A G); (10058 11766885 A G); (10059 11766982 G
A); (10060 11766998 G A); (10061 11767175 G A); (10062 11767484 T C); (10063 11767725 T A); (10064
11768439 C T); (10065 11768624 TG T); (10066 11768712 G A); (10067 11768724 G A); (10068
11768998 C T); (10069 11770286 A C); (10070 11770396 A C); (10071 11770557 T A); (10072 11771215
A T); (10073 11771471 C T); (10074 11771502 G C); (10075 11771788 T C); (10076 11772024 T C); (10077
11772413 T C); (10078 11772445 T C); (10079 11772481 G A); (10080 11772653 G T); (10081 11772917
T C); (10082 11773100 A G); (10083 11773210 A G); (10084 11773807 G A); (10085 11774127 G
A); (10086 11774166 C T); (10087 11774168 C A); (10088 11774223 A T); (10089 11774650 C A); (10090
11774818 A G); (10091 11775375 C T); (10092 11775384 C A); (10093 11775487 T C); (10094 11775508
G A); (10095 11776059 T C); (10096 11776520 G A); (10097 11776566 T C); (10098 11782802 T
C); (10099 11783450 A G); (10100 11789579 T C); (10101 11789765 C T); (10102 11789792 C G); (10103
11789866 T A); (10104 11789886 T A); (10105 11790101 G A); (10106 11790694 G T); (10107 11790729
G T); (10108 11791082 G A); (10109 11791114 T A); (10110 11792990 G A); (10111 11793134 C
T); (10112 11793137 A G); (10113 11793757 CA C); (10114 11794154 C T); (10115 11794187 G A); (10116
11794481 A G); (10117 11794494 A C); (10118 11794527 A T); (10119 11794575 T C); (10120 11794580
T C); (10121 11794656 C T); (10122 11795019 G A); (10123 11795048 T C); (10124 11795812 T C); (10125
11795849 G A); (10126 11795930 T C); (10127 11795939 A G); (10128 11796330 G C); (10129 11796402
G C); (10130 11796486 C T); (10131 11796513 C T); (10132 11796562 G A); (10133 11796659 G
A); (10134 11796697 T A); (10135 11796753 C T); (10136 11796793 G T); (10137 11796798 T C); (10138
11796874 T C); (10139 11797282 G C); (10140 11797297 T C); (10141 11797435 G A); (10142 11797851
G A); (10143 11798240 T C); (10144 11798373 C T); (10145 11798500 C A); (10146 11798520 T A); (10147
11798568 A G); (10148 11798618 C T); (10149 11798840 A T); (10150 11798852 C A); (10151 11798862
G T); (10152 11798868 T G); (10153 11798869 T A); (10154 11798870 T A); (10155 11798871 T A); (10156
11798888 G A); (10157 11798996 G A); (10158 11799038 C T); (10159 11799168 T C); (10160 11799175
T C); (10161 11799370 T C); (10162 11799391 G A); (10163 11799415 C G); (10164 11799478 G
T); (10165 11799865 C T); (10166 11799866 G T); (10167 11800180 TA T); (10168 11800275 G A); (10169
11800282 T C); (10170 11800404 T C); (10171 11800513 A G); (10172 11801071 G T); (10173 11801352
T C); (10174 11801388 C A); (10175 11801950 G C); (10176 11801977 G T); (10177 11802119 G
A); (10178 11802621 T A); (10179 11802677 A AAAAG); (10180 11802739 C T); (10181 11802778 C
T); (10182 11802785 T C); (10183 11803082 C T); (10184 11803098 A G); (10185 11803155 A G); (10186
11803223 A G); (10187 11803226 G A); (10188 11803254 C A); (10189 11803404 G A); (10190 11803433
G A); (10191 11803528 A G); (10192 11804033 A G); (10193 11804136 A G); (10194 11804261 G
C); (10195 11804427 G C); (10196 11804556 T C); (10197 11804579 G C); (10198 11804717 T G); (10199
11804870 A C); (10200 11805057 A G); (10201 11805270 C T); (10202 11805392 A T); (10203 11805722
AC A); (10204 11805932 G A); (10205 11806295 G A); (10206 11806520 A G); (10207 11806549 A
G); (10208 11806592 G A); (10209 11806624 A G); (10210 11807555 C T); (10211 11807734 A G); (10212
11807749 A G); (10213 11807961 A T); (10214 11808370 G A); (10215 11808447 C T); (10216 11808454
C T); (10217 11808825 G A); (10218 11809176 G T); (10219 11809329 T C); (10220 11809537 C
G); (10221 11810043 C CT); (10222 11810140 C T); (10223 11810153 A G); (10224 11810203 C T); (10225
11811005 A C); (10226 11811822 C T); (10227 11812121 T C); (10228 11812495 A G); (10229 11812727
T A); (10230 11812991 C A); (10231 11813141 A T); (10232 11813241 T TC); (10233 11813424 T
C); (10234 11813443 T A); (10235 11813467 C A); (10236 11813553 A G); (10237 11813771 A G); (10238
11813784 T C); (10239 11813997 C T); (10240 11814214 C CT); (10241 11814274 C T); (10242 11814543
T C); (10243 11814626 G A); (10244 11814735 C A); (10245 11814738 T C); (10246 11814897 A T); (10247
11814922 A C); (10248 11815084 T G); (10249 11815117 A G); (10250 11815169 G A); (10251 11815898
A G); (10252 11816074 A G); (10253 11816169 A C); (10254 11816285 GA G); (10255 11816965 C
T); (10256 11817229 C A); (10257 11817249 T C); (10258 11817335 T C); (10259 11817366 G A); (10260
11817719 A G); (10261 11817887 G T); (10262 11818304 A T); (10263 11818824 C T); (10264 11819324
T C); (10265 11825174 A G); (10266 11825310 C T); (10267 11828624 C T); (10268 11829356 A T); (10269
11829403 C T); (10270 11830367 T C); (10271 11830416 C A); (10272 11830474 T C); (10273 11830477 C
T); (10274 11830593 G T); (10275 11831336 T C); (10276 11831709 C T); (10277 11831884 T C); (10278
11832014 C T); (10279 11832149 G T); (10280 11832275 T A); (10281 11832337 T A); (10282 11832533 C
T); (10283 11832573 A T); (10284 11832936 T C); (10285 11833143 A G); (10286 11833341 T G); (10287
11833396 A G); (10288 11833585 A G); (10289 11833686 A G); (10290 11833690 T C); (10291 11833777
G A); (10292 11833837 C T); (10293 11834148 G A); (10294 11834190 G T); (10295 11834219 C
T); (10296 11834236 C T); (10297 11834403 A C); (10298 11834735 G A); (10299 11835085 A G); (10300
11835102 A G); (10301 11835284 G A); (10302 11835740 A G); (10303 11835830 T C); (10304 11835905
C T); (10305 11836029 T C); (10306 11836043 T C); (10307 11836046 C G); (10308 11836088 G A); (10309
11836305 G C); (10310 11836718 C A); (10311 11836764 T A); (10312 11837205 G T); (10313 11837244
A G); (10314 11837600 A G); (10315 11837736 C A); (10316 11837747 G A); (10317 11837991 A
G); (10318 11838110 A C); (10319 11838771 G T); (10320 11838891 C T); (10321 11838937 A G); (10322
11839115 C A); (10323 11839340 C A); (10324 11839566 C T); (10325 11839643 T G); (10326 11839875
C T); (10327 11839995 A C); (10328 11840013 A AAGCT); (10329 11840100 A G); (10330 11840249 A
G); (10331 11840467 T C); (10332 11840530 G T); (10333 11840775 A AT); (10334 11841329 C T); (10335
11841666 A G); (10336 11841957 G A); (10337 11842003 A G); (10338 11842136 A C); (10339 11842312
A G); (10340 11842485 T C); (10341 11842545 T C); (10342 11842768 G A); (10343 11842898 G
A); (10344 11842987 G A); (10345 11843767 A G); (10346 11844273 C T); (10347 11844385 C A); (10348
11844415 C CTAAT); (10349 11844772 A G); (10350 11844952 T A); (10351 11845048 GA G); (10352
11845286 T C); (10353 11845334 T C); (10354 11845344 C T); (10355 11846541 A AT); (10356 11846732
C A); (10357 11847102 G A); (10358 11847680 C T); (10359 11847749 T C); (10360 11847792 G
T); (10361 11847881 G A); (10362 11847941 C A); (10363 11848180 T C); (10364 11848218 A G); (10365
11848242 C A); (10366 11848259 G A); (10367 11848307 T G); (10368 11848531 T C); (10369 11848536
C T); (10370 11848913 A C); (10371 11849353 A G); (10372 11849554 A G); (10373 11849904 G
A); (10374 11850048 G T); (10375 11850078 T C); (10376 11850846 T C); (10377 11850862 G T); (10378
11851027 G A); (10379 11851070 C T); (10380 11851195 G C); (10381 11851294 C T); (10382 11851295
A T); (10383 11851985 A G); (10384 11852032 T C); (10385 11852154 A G); (10386 11852224 T
C); (10387 11852775 G A); (10388 11853115 T C); (10389 11853163 C T); (10390 11853257 T C); (10391
11853305 G A); (10392 11853325 G A); (10393 11853361 A T); (10394 11853363 AC A); (10395
11853438 G T); (10396 11853526 T C); (10397 11853848 C T); (10398 11853982 T G); (10399 11854226 T
C); (10400 11854417 G A); (10401 11854420 C T); (10402 11854486 A G); (10403 11854583 C T); (10404
11854711 T C); (10405 11854847 G A); (10406 11855059 A G); (10407 11855232 G A); (10408 11855245
T C); (10409 11855272 G A); (10410 11856254 A G); (10411 11856378 C T); (10412 11856450 G
T); (10413 11856467 C T); (10414 11857258 A T); (10415 11857571 T C); (10416 11857956 A G); (10417
11858333 G A); (10418 11858552 A G); (10419 11859130 A G); (10420 11859402 T G); (10421 11859534
G A); (10422 11860010 G A); (10423 11860089 G A); (10424 11860138 C T); (10425 11860164 T
C); (10426 11860174 G A); (10427 11860349 TGG T); (10428 11860651 T C); (10429 11860705 A
C); (10430 11860736 C G); (10431 11860769 T C); (10432 11860789 C
CGCGCTGATCGCGCCACTCTG); (10433 11860812 T G); (10434 11861070 A G); (10435 11861351 T
C); (10436 11861460 G A); (10437 11861751 G A); (10438 11861845 T C); (10439 11862031 C T); (10440
11862107 G A); (10441 11862128 C A); (10442 11862188 T TA); (10443 11862262 A G); (10444
11862362 C A); (10445 11862407 T C); (10446 11862572 T G); (10447 11863216 G A); (10448 11863404
T C); (10449 11863499 T A); (10450 11863763 T G); (10451 11864307 C T); (10452 11864403 G A); (10453
11864572 C T); (10454 11864609 G T); (10455 11864691 G A); (10456 11865574 C T); (10457 11865580
C A); (10458 11866012 C A); (10459 11866065 T G); (10460 11866135 T C); (10461 11866291 G
A); (10462 11866666 T C); (10463 11866816 G A); (10464 11866824 G A); (10465 11866852 G A); (10466
11867120 A C); (10467 11867186 T G); (10468 11867248 T C); (10469 11867412 G A); (10470 11867502
C A); (10471 11867603 C T); (10472 11867624 AC A); (10473 11867739 G A); (10474 11867805 A
G); (10475 11867827 C T); (10476 11867982 T A); (10477 11868197 C T); (10478 11868451 G T); (10479
11868474 C G); (10480 11868551 AATAT A); (10481 11868927 T C); (10482 11869136 C T); (10483
11870135 T G); (10484 11870201 C A); (10485 11870376 T C); (10486 11870422 G A); (10487 11870635
A G); (10488 11870748 G A); (10489 11870831 T TGGG); (10490 11870925 G A); (10491 11871035 T
C); (10492 11871072 G A); (10493 11871079 G A); (10494 11871126 T A); (10495 11871127 T G); (10496
11871212 C T); (10497 11871303 A G); (10498 11871331 T C); (10499 11871432 A G); (10500 11871441
T C); (10501 11871585 T A); (10502 11871616 A C); (10503 11871725 G A); (10504 11871742 G
GC); (10505 11871975 T G); (10506 11872179 C T); (10507 11872340 C T); (10508 11872382 C T); (10509
11872567 G A); (10510 11872903 G A); (10511 11872979 C T); (10512 11873003 C T); (10513 11873083
G A); (10514 11873156 C T); (10515 11873334 C T); (10516 11873452 C T); (10517 11873523 T C); (10518
11873568 A G); (10519 11873804 G A); (10520 11873965 C T); (10521 11874013 A G); (10522 11874116
C T); (10523 11874134 A G); (10524 11874211 C G); (10525 11874397 A G); (10526 11874583 T
C); (10527 11874690 T C); (10528 11874830 T C); (10529 11874854 G A); (10530 11875005 G A); (10531
11875051 T C); (10532 11875115 C T); (10533 11875127 G A); (10534 11875366 A G); (10535 11875367
G A); (10536 11875559 T C); (10537 11875696 A T); (10538 11875917 G T); (10539 11875945 T C); (10540
11876173 AT A); (10541 11876256 TG T); (10542 11876391 C T); (10543 11876531 G A); (10544
11876596 G GAACAAGACTCTTTTA); (10545 11876797 G A); (10546 11877172 G A); (10547 11877260 C
T); (10548 11877261 T C); (10549 11877521 A G); (10550 11877694 A G); (10551 11877744 G A); (10552
11877811 G T); (10553 11877834 G C); (10554 11877866 A AC); (10555 11877896 T G); (10556
11878064 G GT); (10557 11878751 T C); (10558 11878753 G A); (10559 11878764 T C); (10560 11878886
G A); (10561 11878925 A G); (10562 11878969 C T); (10563 11879247 G A); (10564 11879359 C
T); (10565 11879904 T G); (10566 11880142 A G); (10567 11880219 T C); (10568 11880466 T C); (10569
11880483 A G); (10570 11880508 C T); (10571 11880931 A C); (10572 11880939 A G); (10573 11880996
A G); (10574 11881320 A G); (10575 11881327 C T); (10576 11881381 A G); (10577 11882013 C
T); (10578 11882068 GCACA G); (10579 11882076 T A); (10580 11882280 T C); (10581 11882293 G
A); (10582 11882296 C T); (10583 11882297 T C); (10584 11882298 T C); (10585 11882374 G A); (10586
11882419 C T); (10587 11882483 C T); (10588 11882551 T C); (10589 11882560 C T); (10590 11882796 G
A); (10591 11882826 G A); (10592 11882858 G T); (10593 11883023 C G); (10594 11883169 C T); (10595
11883255 G A); (10596 11883302 G A); (10597 11883363 T C); (10598 11883424 A G); (10599 11883463
C A); (10600 11883608 T C); (10601 11883815 T A); (10602 11884061 T C); (10603 11884212 A T); (10604
11886054 A G); (10605 11886912 G A); (10606 11886917 A G); (10607 11887038 T C); (10608 11887481
G A); (10609 11888206 A G); (10610 11888302 G A); (10611 11888847 C T); (10612 11893700 G
A); (10613 11894749 C T); (10614 11894801 T G); (10615 11896325 C G); (10616 11896326 C T); (10617
11896362 TA T); (10618 11896471 C T); (10619 11896557 G A); (10620 11896702 C T); (10621 11897485
G A); (10622 11897516 A T); (10623 11897711 A G); (10624 11897762 A G); (10625 11897855 T
C); (10626 11898042 G A); (10627 11898350 C T); (10628 11898383 A G); (10629 11898401 G A); (10630
11898438 A T); (10631 11898953 T C); (10632 11899001 A G); (10633 11899655 G T); (10634 11899667
T C); (10635 11899785 A G); (10636 11899839 G A); (10637 11900487 A T); (10638 11901240 G
A); (10639 11901260 T C); (10640 11901287 C T); (10641 11901310 G A); (10642 11901350 T C); (10643
11901385 T C); (10644 11901747 C T); (10645 11902230 G A); (10646 11907493 A T); (10647 11907499 T
C); (10648 11907722 C A); (10649 11909556 A T); (10650 11909736 T C); (10651 11909773 G T); (10652
11909824 A G); (10653 11909946 A G); (10654 11910571 G A); (10655 11911778 A G); (10656 11911830
G A); (10657 11912135 A C); (10658 11912165 G A); (10659 11912197 C T); (10660 11912222 G
T); (10661 11912253 A G); (10662 11912281 A G); (10663 11912297 C T); (10664 11912346 C T); (10665
11912380 T C); (10666 11912471 C T); (10667 11912486 G A); (10668 11912634 A G); (10669 11912648
T C); (10670 11912950 T C); (10671 11913133 A G); (10672 11913244 A G); (10673 11913262 C
G); (10674 11913309 A G); (10675 11913696 T C); (10676 11914556 T C); (10677 11914565 C T); (10678
11914633 A G); (10679 11914760 T C); (10680 11914959 A G); (10681 11914995 T A); (10682 11915250
G T); (10683 11915411 G A); (10684 11915468 G A); (10685 11915533 T TACCTAAC); (10686 11915886 G
A); (10687 11916055 G A); (10688 11916175 C T); (10689 11916271 T C); (10690 11916361 C A); (10691
11916376 C T); (10692 11916987 A C); (10693 11917060 G T); (10694 11917101 T C); (10695 11917204
G A); (10696 11917376 G A); (10697 11917477 G A); (10698 11917538 G A); (10699 11917805 C
A); (10700 11917897 A AT); (10701 11918181 TAATG T); (10702 11918485 CT C); (10703 11918572 A
G); (10704 11918576 G A); (10705 11919438 T C); (10706 11919466 T C); (10707 11919798 G A); (10708
11919940 T C); (10709 11920547 T C); (10710 11920960 T A); (10711 11921511 T C); (10712 11921907 A
T); (10713 11922304 G A); (10714 11922414 C T); (10715 11922780 A T); (10716 11923009 A G); (10717
11923099 T G); (10718 11923113 T C); (10719 11923398 G A); (10720 11923538 G T); (10721 11923678
T A); (10722 11923705 T TA); (10723 11923717 G T); (10724 11923857 T TCATGAA); (10725 11923860 A
G); (10726 11924040 T C); (10727 11924052 G T); (10728 11924126 A G); (10729 11924250 C A); (10730
11924305 G GA); (10731 11924643 A T); (10732 11924723 G A); (10733 11924754 G T); (10734
11925251 G A); (10735 11925285 C T); (10736 11925747 C T); (10737 11925804 A G); (10738 11926028
T C); (10739 11926396 C T); (10740 11926493 A C); (10741 11926675 G A); (10742 11927399 A
G); (10743 11927432 C T); (10744 11927433 G A); (10745 11927509 A G); (10746 11927625 A G); (10747
11927870 C T); (10748 11928262 G A); (10749 11928303 G A); (10750 11928479 T C); (10751 11928700
T C); (10752 11929664 C T); (10753 11929962 G A); (10754 11930078 G A); (10755 11930126 G
A); (10756 11930346 C T); (10757 11930360 C T); (10758 11930623 C T); (10759 11930739 G A); (10760
11930759 C T); (10761 11930931 C T); (10762 11931014 A G); (10763 11931268 A C); (10764 11931493
G A); (10765 11931582 C CA); (10766 11931701 C T); (10767 11931834 T C); (10768 11931899 G
A); (10769 11932509 A C); (10770 11932625 T G); (10771 11932797 G T); (10772 11932924 A G); (10773
11932925 A T); (10774 11933011 G T); (10775 11933258 T A); (10776 11933386 T G); (10777 11933424
C T); (10778 11933607 G A); (10779 11933670 T TAGATCA); (10780 11934476 G A); (10781 11934658 A
T); (10782 11934660 A AAGTT); (10783 11935231 G A); (10784 11935492 C A); (10785 11935979 T
C); (10786 11936170 T C); (10787 11936187 C G); (10788 11936651 G A); (10789 11936706 T G); (10790
11936804 C CAT); (10791 11937439 C T); (10792 11937945 A G); (10793 11937956 T C); (10794
11938107 A G); (10795 11938142 A C); (10796 11939964 T C); (10797 11940210 A G); (10798 11940277
A G); (10799 11940296 G A); (10800 11940399 C T); (10801 11940458 T C); (10802 11940570 A
G); (10803 11940974 A G); (10804 11941183 C A); (10805 11941356 C T); (10806 11941434 C T); (10807
11941534 T C); (10808 11941642 T C); (10809 11941668 A G); (10810 11941732 A G); (10811 11941735
G A); (10812 11941829 G A); (10813 11941877 A G); (10814 11942059 T C); (10815 11942287 G
A); (10816 11942543 G A); (10817 11943230 A G); (10818 11944074 G A); (10819 11944515 C T); (10820
11944651 A C); (10821 11945426 C A); (10822 11945631 G A); (10823 11945792 C CAAA); (10824
11946303 G A); (10825 11946367 A G); (10826 11946495 T C); (10827 11946503 G A); (10828 11946642
C T); (10829 11946806 T C); (10830 11947176 A G); (10831 11947438 T TAGACGAGAATGGGTC); (10832
11948074 T C); (10833 11948363 T A); (10834 11948381 C T); (10835 11948505 A T); (10836 11948789 T
C); (10837 11948874 T A); (10838 11949204 T C); (10839 11949244 G A); (10840 11950154 C T); (10841
11950251 A C); (10842 11952257 G A); (10843 11953463 G C); (10844 11953587 G A); (10845 11955993
T C); (10846 11957739 A T); (10847 11958666 C T); (10848 11959037 G T); (10849 11961520 T C); (10850
11961555 ATGGTGAATG A); (10851 11961568 C T); (10852 11961622 A G); (10853 11962179 G
A); (10854 11962377 C T); (10855 11963381 T C); (10856 11964130 G T); (10857 11964407 C T); (10858
11964599 A G); (10859 11965148 A T); (10860 11965946 T TA); (10861 11965988 A G); (10862
11966024 G A); (10863 11966132 G A); (10864 11966322 C T); (10865 11966364 A G); (10866 11966672
T C); (10867 11967230 A G); (10868 11967422 A G); (10869 11967488 G A); (10870 11968602 C
A); (10871 11970389 G A); (10872 11970414 T C); (10873 11970752 G A); (10874 11971063 G A); (10875
11971317 A C); (10876 11971669 G A); (10877 11972101 A T); (10878 11972706 G A); (10879 11973073
A G); (10880 11973167 A G); (10881 11973241 A G); (10882 11973279 A G); (10883 11973302 C
T); (10884 11973583 G A); (10885 11973658 T C); (10886 11973687 T C); (10887 11973817 G T); (10888
11973887 T C); (10889 11973896 G A); (10890 11973971 T G); (10891 11974000 A G); (10892 11974092
T C); (10893 11974115 G A); (10894 11974145 G T); (10895 11974587 G A); (10896 11974761 C
T); (10897 11974889 C T); (10898 11975208 T TAAGAGCTAAAAG); (10899 11975284 G A); (10900
11975310 C A); (10901 11975363 A G); (10902 11975394 C T); (10903 11975550 A G); (10904 11975582
C T); (10905 11976098 T G); (10906 11976186 C T); (10907 11976247 G A); (10908 11976301 T C); (10909
11976303 A G); (10910 11976449 T C); (10911 11976512 C T); (10912 11976952 A G); (10913 11977168
C T); (10914 11977174 G T); (10915 11977177 A G); (10916 11977268 T G); (10917 11977376 T
C); (10918 11977386 T C); (10919 11977614 A T); (10920 11977680 C T); (10921 11978011 T C); (10922
11978266 C T); (10923 11978383 C T); (10924 11978663 G A); (10925 11978804 C T); (10926 11979395 C
T); (10927 11980153 G A); (10928 11980294 T C); (10929 11980543 G A); (10930 11980882 T C); (10931
11981060 T G); (10932 11981133 A G); (10933 11981410 C T); (10934 11981517 G A); (10935 11981546
T G); (10936 11982167 G A); (10937 11982200 G A); (10938 11982243 G A); (10939 11982285 A
G); (10940 11982554 C T); (10941 11982602 T C); (10942 11984036 T C); (10943 11985836 T C); (10944
11985892 T C); (10945 11985945 A G); (10946 11986297 C T); (10947 11986524 C T); (10948 11986915 T
G); (10949 11987040 A G); (10950 11987215 T C); (10951 11988223 A G); (10952 11988570 C T); (10953
11989064 T C); (10954 11989082 C T); (10955 11989270 CAT C); (10956 11989566 C G); (10957
11989742 A G); (10958 11989813 G A); (10959 11990036 C T); (10960 11990332 A G); (10961 11990357
G A); (10962 11991528 A G); (10963 11991783 A C); (10964 11991819 C T); (10965 11992059 T
C); (10966 11992076 G A); (10967 11992498 T A); (10968 11992795 A G); (10969 11992995 C T); (10970
11993157 G C); (10971 11993346 T C); (10972 11993478 T C); (10973 11993713 C T); (10974 11993750 T
TA); (10975 11994091 G C); (10976 11994516 C G); (10977 11994551 A T); (10978 11994733 A
AC); (10979 11994912 C T); (10980 11994939 A C); (10981 11995213 C A); (10982 11995624 G C); (10983
11995808 A T); (10984 11995935 A C); (10985 11996417 A C); (10986 11997166 A G); (10987 11997242
A G); (10988 11997400 A G); (10989 11997472 G A); (10990 11997883 C T); (10991 11998069 C
T); (10992 11998919 G T); (10993 11999128 G A); (10994 11999130 T C); (10995 12001407 C T); (10996
12001474 G A); (10997 12001843 G A); (10998 12002001 G A); (10999 12002849 T C); (11000 12003154
C T); (11001 12003406 T C); (11002 12003673 T C); (11003 12003694 T C); (11004 12003731 C T); (11005
12003771 C T); (11006 12003912 C T); (11007 12003916 C T); (11008 12004815 C T); (11009 12004943 C
T); (11010 12005748 T C); (11011 12006245 T G); (11012 12006246 T G); (11013 12006266 A T); (11014
12006267 T A); (11015 12006346 T C); (11016 12006664 T G); (11017 12007044 T A); (11018 12007058
A AC); (11019 12007132 C A); (11020 12007181 G A); (11021 12007292 A G); (11022 12007299 T
C); (11023 12007396 G A); (11024 12007509 C T); (11025 12007760 TG T); (11026 12007838 A G); (11027
12007901 A G); (11028 12008076 C T); (11029 12011032 G A); (11030 12011445 G A); (11031 12011461
G T); (11032 12011579 C T); (11033 12011797 A G); (11034 12012015 C T); (11035 12012163 C
G); (11036 12012305 C A); (11037 12012360 CATTT C); (11038 12012483 T C); (11039 12012800 A
T); (11040 12012999 T C); (11041 12013016 A G); (11042 12013348 C A); (11043 12013372 C T); (11044
12016778 T C); (11045 12017339 C T); (11046 12017559 G A); (11047 12017766 C T); (11048 12018156
A C); (11049 12018685 G T); (11050 12018779 G A); (11051 12018853 A T); (11052 12018988 C
T); (11053 12019008 A G); (11054 12019796 A G); (11055 12020084 T C); (11056 12020456 C T); (11057
12021053 A G); (11058 12021496 T C); (11059 12022866 C T); (11060 12022955 CT C); (11061 12023081
C T); (11062 12023607 A G); (11063 12024211 T G); (11064 12025399 T C); (11065 12025433 TCTAG
T); (11066 12026608 T C); (11067 12026804 C A); (11068 12027004 C T); (11069 12027194 A C); (11070
12027468 G A); (11071 12027498 C T); (11072 12027601 G A); (11073 12027634 T C); (11074 12027688
C T); (11075 12027733 A G); (11076 12028252 G A); (11077 12028540 G A); (11078 12028623 T
C); (11079 12028678 G C); (11080 12028850 T C); (11081 12028959 G A); (11082 12028985 G A); (11083
12029056 C T); (11084 12029164 C CAACG); (11085 12029711 A G); (11086 12029801 G A); (11087
12030440 AC A); (11088 12030804 TA T); (11089 12031388 C A); (11090 12031407
ACGTTTATATTTAAGCAAT A); (11091 12032214 T C); (11092 12032929 C T); (11093 12033379
GTATTTAAACCTA G); (11094 12033606 T A); (11095 12033610 TTA T); (11096 12035267 A G); (11097
12035312 G A); (11098 12035339 C T); (11099 12035648 A T); (11100 12035688 G A); (11101 12035730
A G); (11102 12036234 A G); (11103 12036373 C T); (11104 12036419 T C); (11105 12036471 A
G); (11106 12036656 G A); (11107 12036688 G A); (11108 12036765 G A); (11109 12036783 C T); (11110
12036877 A G); (11111 12037046 A C); (11112 12037124 T A); (11113 12037137 C T); (11114 12037191
T C); (11115 12037320 C T); (11116 12037434 G T); (11117 12037486 T C); (11118 12037491 C T); (11119
12037627 A G); (11120 12037682 A G); (11121 12038107 T C); (11122 12038150 A G); (11123 12038181
A G); (11124 12038354 T C); (11125 12038362 C T); (11126 12038436 T C); (11127 12038451 G
A); (11128 12038602 C A); (11129 12038783 T C); (11130 12039048 C T); (11131 12039174 C T); (11132
12039384 C G); (11133 12039393 C T); (11134 12041953 A G); (11135 12042040 G A); (11136 12042100
T G); (11137 12042144 G A); (11138 12042241 A G); (11139 12042331 G C); (11140 12042598 G
A); (11141 12042601 AT A); (11142 12042933 C T); (11143 12042960 G A); (11144 12043207 A C); (11145
12043226 T A); (11146 12043318 C T); (11147 12043350 G T); (11148 12043966 A G); (11149 12044065
A G); (11150 12044081 T C); (11151 12044166 A G); (11152 12044172 T G); (11153 12044284 A
G); (11154 12044342 T C); (11155 12044407 G A); (11156 12044414 G A); (11157 12044420 G A); (11158
12044426 G T); (11159 12044459 G A); (11160 12044570 T A); (11161 12044652 C T); (11162 12044738
T C); (11163 12044739 A C); (11164 12044750 C T); (11165 12044843 T C); (11166 12044879 G A); (11167
12044890 T C); (11168 12044953 T C); (11169 12045072 T C); (11170 12045119 G A); (11171 12045121 T
C); (11172 12045144 A C); (11173 12045352 G A); (11174 12045371 G A); (11175 12045396 G A); (11176
12045417 T C); (11177 12045422 C T); (11178 12045547 C T); (11179 12045579 T C); (11180 12045662 G
A); (11181 12045837 C T); (11182 12045977 T C); (11183 12046258 A G); (11184 12046277 C T); (11185
12046576 G C); (11186 12046607 G A); (11187 12046631 T G); (11188 12046785 G A); (11189 12046859
G C); (11190 12046916 T C); (11191 12047097 G A); (11192 12047483 C T); (11193 12047585 A
G); (11194 12047604 T C); (11195 12047746 G A); (11196 12047859 G A); (11197 12048742 T TA); (11198
12048824 A G); (11199 12049419 TTA T); (11200 12049521 G T); (11201 12049888 T A); (11202
12050137 CA C); (11203 12050196 G GA); (11204 12050679 A AT); (11205 12050799 T C); (11206
12050893 G GGTTCAGCTGGTACTGATCGAATTC); (11207 12051195 TTA T); (11208 12051318 A
G); (11209 12051559 C T); (11210 12053450 G T); (11211 12053789 G T); (11212 12054868 AT A); (11213
12054928 T TA); (11214 12055225 A T); (11215 12055343 C G); (11216 12055891 C T); (11217 12056009
C T); (11218 12056036 G A); (11219 12056079 A G); (11220 12056269 A T); (11221 12056366 G
T); (11222 12056925 G T); (11223 12056993 G GATA); (11224 12057035 G A); (11225 12057208 G
A); (11226 12057294 C T); (11227 12057776 G A); (11228 12057794 T A); (11229 12057797 C T); (11230
12057859 C T); (11231 12057892 C T); (11232 12058032 TA T); (11233 12058417 A G); (11234 12058444
T C); (11235 12058982 C T); (11236 12059127 G A); (11237 12059158 A G); (11238 12059300 A
G); (11239 12059455 G T); (11240 12059533 C T); (11241 12059570 A G); (11242 12059601 C A); (11243
12059867 G A); (11244 12059875 G GC); (11245 12059936 G A); (11246 12060069 A G); (11247
12060110 T C); (11248 12060112 G C); (11249 12060140 C G); (11250 12060196
GGCAAAAAGAGGAGAATTAA G); (11251 12060357 T C); (11252 12060364 A G); (11253 12060607 AC
A); (11254 12060950 C A); (11255 12061153 A C); (11256 12061489 T C); (11257 12061586 G A); (11258
12061888 A G); (11259 12063597 A G); (11260 12063634 C T); (11261 12063682 C A); (11262 12063906
C T); (11263 12064079 T C); (11264 12064086 A G); (11265 12064613 G A); (11266 12065132 TA
T); (11267 12065338 A G); (11268 12065694 G A); (11269 12065773 T C); (11270 12066781 C T); (11271
12066796 C T); (11272 12066863 C T); (11273 12066976 T A); (11274 12067038 C T); (11275 12067173 T
G); (11276 12067301 T C); (11277 12067303 C T); (11278 12067401 G C); (11279 12067615 T C); (11280
12067871 C G); (11281 12067953 G A); (11282 12068040 T G); (11283 12068231 C T); (11284 12069340
A G); (11285 12069464 G T); (11286 12069496 C T); (11287 12070525 T C); (11288 12070967 C
G); (11289 12071263 T C); (11290 12071521 C T); (11291 12071552 A G); (11292 12071589 G A); (11293
12071620 C T); (11294 12071632 A G); (11295 12071798 T C); (11296 12071962 C T); (11297 12075985 C
G); (11298 12076673 T A); (11299 12078859 GGTATACGTATTTGT G); (11300 12079466 A T); (11301
12079469 C A); (11302 12079486 C G); (11303 12080023 A G); (11304 12080038 A G); (11305 12080044
G A); (11306 12080278 T A); (11307 12080325 G A); (11308 12080995 C A); (11309 12081097 T
C); (11310 12081357 T A); (11311 12081581 C T); (11312 12081615 C T); (11313 12081657 A C); (11314
12081766 C T); (11315 12081911 A G); (11316 12082099 CAAT C); (11317 12082292 G C); (11318
12082311 A G); (11319 12082902 C T); (11320 12083078 A G); (11321 12083668 G A); (11322 12083789
A G); (11323 12084283 G A); (11324 12084420 G C); (11325 12085135 C T); (11326 12085321 A
G); (11327 12086107 G A); (11328 12087132 A G); (11329 12087217 G A); (11330 12087534 G A); (11331
12087565 T C); (11332 12088522 G A); (11333 12088770 ACTAGAGGTAGTG A); (11334 12089202 T
C); (11335 12089418 A T); (11336 12090443 G A); (11337 12090528 C T); (11338 12090823 G A); (11339
12090875 G A); (11340 12091343 A G); (11341 12091361 A G); (11342 12091438 C A); (11343 12091651
A G); (11344 12091713 T C); (11345 12092116 A G); (11346 12092118 C T); (11347 12092787 C
A); (11348 12092997 T C); (11349 12093153 A G); (11350 12093216 A C); (11351 12094036 G A); (11352
12094064 T C); (11353 12094572 G A); (11354 12094715 C T); (11355 12094784 G A); (11356 12095232
G A); (11357 12095541 G T); (11358 12095672 G C); (11359 12096397 G A); (11360 12096626 C
T); (11361 12096645 T C); (11362 12096680 G A); (11363 12097015 T G); (11364 12097444 C T); (11365
12097570 A C); (11366 12097584 A C); (11367 12097672 G A); (11368 12097711 A G); (11369 12097806
C T); (11370 12097928 C A); (11371 12098114 T C); (11372 12098222 G C); (11373 12098411 T C); (11374
12100044 G A); (11375 12100114 C A); (11376 12100286 C T); (11377 12100392 A C); (11378 12100400
A G); (11379 12101080 T C); (11380 12101370 C T); (11381 12101679 G A); (11382 12101811 C
T); (11383 12101901 C T); (11384 12102074 C A); (11385 12102371 G A); (11386 12102374 T C); (11387
12102869 T C); (11388 12102940 T C); (11389 12103539 C T); (11390 12103587 T C); (11391 12103643 C
T); (11392 12103704 T C); (11393 12103807 A G); (11394 12103865 G A); (11395 12103880 G T); (11396
12104354 C T); (11397 12104677 A G); (11398 12104679 C T); (11399 12104681 G A); (11400 12105017
A T); (11401 12105733 A T); (11402 12105954 A G); (11403 12106088 A G); (11404 12106178 C
A); (11405 12106397 A G); (11406 12106780 C T); (11407 12106983 T A); (11408 12107175 A G); (11409
12107565 A C); (11410 12108360 G A); (11411 12108883 TTT AAA); (11412 12109062 T C); (11413
12109067 T C); (11414 12109465 C T); (11415 12109537 T A); (11416 12109929 G A); (11417 12110392
C A); (11418 12110439 A G); (11419 12110719 A C); (11420 12111970 T C); (11421 12112191 G
A); (11422 12112289 A G); (11423 12113179 A G); (11424 12113206 A G); (11425 12113393 A T); (11426
12113588 C CT); (11427 12114282 A T); (11428 12115492 T C); (11429 12116743 G A); (11430 12118526
T C); (11431 12118531 A G); (11432 12118733 C T); (11433 12119161 G C); (11434 12119499 A
G); (11435 12119800 G A); (11436 12119868 C T); (11437 12119967 T G); (11438 12119987 T C); (11439
12120012 A G); (11440 12120409 A G); (11441 12120785 A G); (11442 12120878 G C); (11443 12120906
A G); (11444 12120923 G A); (11445 12121158 A G); (11446 12121218 G A); (11447 12121399 A
T); (11448 12121735 A G); (11449 12121741 T C); (11450 12122016 T C); (11451 12122410 T C); (11452
12123030 T C); (11453 12123071 A G); (11454 12123102 C T); (11455 12125919 A G); (11456 12126291
C T); (11457 12126306 A G); (11458 12126346 A G); (11459 12126416 G C); (11460 12126422 A
G); (11461 12126758 G A); (11462 12126894 A C); (11463 12126917 C T); (11464 12126920 A G); (11465
12126933 G T); (11466 12127096 G A); (11467 12127190 A C); (11468 12127234 A C); (11469 12127284
C T); (11470 12127979 A T); (11471 12128027 G A); (11472 12128341 G A); (11473 12128353 G
C); (11474 12128387 C A); (11475 12128474 C T); (11476 12128666 A G); (11477 12128761 T C); (11478
12129090 T A); (11479 12129175 A G); (11480 12129425 A G); (11481 12129495 A AT); (11482
12129556 T A); (11483 12129934 CCG C); (11484 12129988 A C); (11485 12130496 A G); (11486
12130687 CT C); (11487 12132321 T C); (11488 12132535 C CTTTAA); (11489 12133447 A G); (11490
12133550 A T); (11491 12133875 A G); (11492 12134158 C A); (11493 12134247 A AAT); (11494
12134307 A AC); (11495 12134846 C CT); (11496 12135505 A T); (11497 12135744 G T); (11498
12135948 G A); (11499 12136109 G A); (11500 12136168 C G); (11501 12136859 A G); (11502 12137143
C T); (11503 12137251 C T); (11504 12137300 G A); (11505 12137506 T C); (11506 12137517 G C); (11507
12137531 C T); (11508 12137611 G A); (11509 12137756 A G); (11510 12137878 T C); (11511 12138518
T C); (11512 12138671 C A); (11513 12139456 C T); (11514 12139599 C T); (11515 12139735 G A); (11516
12139850 A G); (11517 12141075 CTTA C); (11518 12141234 G C); (11519 12141777 C T); (11520
12141805 C T); (11521 12141876 G A); (11522 12142159 A G); (11523 12142570 T C); (11524 12142585
A T); (11525 12142618 C A); (11526 12142632 T C); (11527 12143169 C T); (11528 12143600 A G); (11529
12143616 T A); (11530 12144009 G A); (11531 12144042 T C); (11532 12144669 C A); (11533 12144882
GA G); (11534 12145362 G A); (11535 12145794 G A); (11536 12146383 AAG A); (11537 12146601 T
G); (11538 12146893 A G); (11539 12146916 T A); (11540 12146959 G GA); (11541 12147059 CT
C); (11542 12147082 T A); (11543 12147221 A G); (11544 12147352 A T); (11545 12147443 T C); (11546
12147621 A G); (11547 12147894 A G); (11548 12148458 C T); (11549 12148887 C T); (11550 12148919
CA C); (11551 12149121 T C); (11552 12149189 G A); (11553 12149254 T G); (11554 12149330 C
T); (11555 12149468 T C); (11556 12150443 G C); (11557 12150544 T G); (11558 12150590 C T); (11559
12150744 A G); (11560 12150807 T G); (11561 12150846 A G); (11562 12150959 G A); (11563 12151528
G A); (11564 12151599 G A); (11565 12151612 G T); (11566 12152147 G T); (11567 12152341 A
G); (11568 12152440 G A); (11569 12152494 G T); (11570 12152530 T C); (11571 12152992 C T); (11572
12153655 T C); (11573 12153678 G A); (11574 12153732 A G); (11575 12153862 ATACT A); (11576
12154163 A C); (11577 12154273 T C); (11578 12154292 T C); (11579 12154318 G C); (11580 12154512
G A); (11581 12154537 G A); (11582 12155104 A G); (11583 12155130 C T); (11584 12155597 A
G); (11585 12156114 G T); (11586 12156223 T G); (11587 12156861 T C); (11588 12156912 G A); (11589
12157433 T C); (11590 12157640 AT A); (11591 12157835 G A); (11592 12158060 T C); (11593 12158082
T C); (11594 12158093 C T); (11595 12158140 A G); (11596 12158154 T G); (11597 12158192 A
G); (11598 12158198 C T); (11599 12158202 A G); (11600 12158215 C T); (11601 12158595 T C); (11602
12159731 A T); (11603 12159742 GGGT G); (11604 12162913 GA G); (11605 12162988 A T); (11606
12163589 A G); (11607 12163887 T C); (11608 12163943 G A); (11609 12163966 C T); (11610 12163970
C T); (11611 12164355 A AATATAT); (11612 12164458 T A); (11613 12164461 A G); (11614 12164462 G
T); (11615 12164463 T A); (11616 12164574 TA T); (11617 12164894 C A); (11618 12165321 A G); (11619
12165570 A AAATTATCTACAATCT); (11620 12165774 T C); (11621 12166007 T C); (11622 12166114 G
A); (11623 12166119 G A); (11624 12166133 AC A); (11625 12166379 A G); (11626 12166728 A
T); (11627 12166915 A G); (11628 12167229 G A); (11629 12167294 T C); (11630 12167383 G A); (11631
12167528 G A); (11632 12167762 C A); (11633 12167953 G A); (11634 12168327 G A); (11635 12168698
G A); (11636 12168774 A G); (11637 12169191 T A); (11638 12169490 A G); (11639 12169681 A
G); (11640 12169724 C A); (11641 12169733 T G); (11642 12169754 T C); (11643 12170309 T C); (11644
12170435 T C); (11645 12170744 C T); (11646 12170999 C T); (11647 12171347 C T); (11648 12171351 T
G); (11649 12171601 A T); (11650 12171728 G A); (11651 12171819 C T); (11652 12172872 G A); (11653
12172957 C T); (11654 12172995 A C); (11655 12173055 T C); (11656 12173233 T C); (11657 12173560 A
T); (11658 12173660 G A); (11659 12174319 C T); (11660 12174391 A T); (11661 12175361 C T); (11662
12175805 C T); (11663 12176237 C G); (11664 12176499 G A); (11665 12176674 A G); (11666 12177037
T C); (11667 12177187 A G); (11668 12177230 T C); (11669 12177293 T C); (11670 12178862 G
A); (11671 12180387 C T); (11672 12181778 T C); (11673 12186783 A G); (11674 12186938 C T); (11675
12186953 C T); (11676 12187024 G A); (11677 12187177 C T); (11678 12187265 T C); (11679 12187381 T
C); (11680 12187394 T C); (11681 12187709 A G); (11682 12189015 T A); (11683 12189099 G T); (11684
12189124 T C); (11685 12189286 C A); (11686 12189315 A G); (11687 12189454 C T); (11688 12190042
A G); (11689 12190157 C T); (11690 12190509 C T); (11691 12190599 G A); (11692 12190690 A
G); (11693 12190735 G A); (11694 12190910 C T); (11695 12191261 ATTT A); (11696 12191333 A
T); (11697 12191521 C T); (11698 12191638 T C); (11699 12191987 T G); (11700 12192366 C A); (11701
12192599 A C); (11702 12192833 C G); (11703 12193271 A C); (11704 12193407 A G); (11705 12193605
G A); (11706 12193649 C T); (11707 12194362 A G); (11708 12194405 C T); (11709 12195445 G
A); (11710 12195611 T C); (11711 12195708 C T); (11712 12195889 T C); (11713 12196016 C T); (11714
12196415 A G); (11715 12196751 G A); (11716 12196950 C T); (11717 12197619 T C); (11718 12197776
A G); (11719 12197989 C T); (11720 12198240 GA G); (11721 12198574 T C); (11722 12198800 T
C); (11723 12199084 T C); (11724 12199236 G A); (11725 12199240 T C); (11726 12199316 T G); (11727
12199372 G A); (11728 12200008 G C); (11729 12200146 A G); (11730 12200307 CTTT C); (11731
12200355 C T); (11732 12200566 A G); (11733 12200808 C T); (11734 12201512 G A); (11735 12201636
C T); (11736 12201703 C T); (11737 12201734 A G); (11738 12201767 T C); (11739 12202183 G
A); (11740 12202517 G A); (11741 12202797 G A); (11742 12203541 G A); (11743 12203672 T C); (11744
12203752 G T); (11745 12203849 C T); (11746 12204057 T G); (11747 12204127 C T); (11748 12204135 T
C); (11749 12205022 T C); (11750 12205031 G A); (11751 12205495 A G); (11752 12205894 AT A); (11753
12206063 C T); (11754 12206276 A T); (11755 12207053 T TA); (11756 12207801 C G); (11757 12208241
T A); (11758 12209001 C A); (11759 12209309 A G); (11760 12209669 G GT); (11761 12211274 A
G); (11762 12211303 T C); (11763 12211591 G A); (11764 12212190 C T); (11765 12213070 C T); (11766
12213557 G A); (11767 12213927 A C); (11768 12214296 G A); (11769 12216228 A G); (11770 12216377
A T); (11771 12217076 A G); (11772 12217220 T A); (11773 12217259 T A); (11774 12218138 G
A); (11775 12218167 C T); (11776 12218181 G A); (11777 12218195 A G); (11778 12218205 C G); (11779
12218363 G A); (11780 12218462 G A); (11781 12218678 T C); (11782 12219170 C T); (11783 12219195
C T); (11784 12219262 A ATC); (11785 12219291 T G); (11786 12219712 T C); (11787 12220074 A
G); (11788 12220306 G A); (11789 12220511 C T); (11790 12220921 G A); (11791 12221143 T G); (11792
12221171 G A); (11793 12221923 T C); (11794 12221952 G T); (11795 12222602 G T); (11796 12223749
G A); (11797 12224695 G T); (11798 12224995 G T); (11799 12225658 TA T); (11800 12226743 C
T); (11801 12226848 C T); (11802 12226905 A G); (11803 12226996 C T); (11804 12227145 A G); (11805
12227254 C T); (11806 12227504 T G); (11807 12227808 T TA); (11808 12227827 C T); (11809 12227831
A C); (11810 12227863 A G); (11811 12227912 T C); (11812 12227915 A G); (11813 12227989 A
G); (11814 12228629 C G); (11815 12229870 G A); (11816 12230194 C A); (11817 12230694 G A); (11818
12230934 C T); (11819 12231145 G A); (11820 12232709 G A); (11821 12232737 T C); (11822 12232832
C T); (11823 12233077 C T); (11824 12233402 C T); (11825 12233789 G A); (11826 12233961 C T); (11827
12234081 T C); (11828 12234109 A C); (11829 12234199 C A); (11830 12234269 G A); (11831 12235239
T G); (11832 12235892 C G); (11833 12236218 T G); (11834 12236239 A G); (11835 12236428 G
A); (11836 12236470 C T); (11837 12237086 A C); (11838 12237764 C A); (11839 12238276 T A); (11840
12238606 G T); (11841 12238658 AT A); (11842 12239248 G A); (11843 12240197 A G); (11844
12241008 G A); (11845 12241282 C T); (11846 12241302 C T); (11847 12242086 C T); (11848 12242737
GA); (11849 12243007 C T); (11850 12243022 A G); (11851 12243326 G A); (11852 12243464 A
G); (11853 12243505 C T); (11854 12244524 T C); (11855 12244543 C T); (11856 12244753 T C); (11857
12245096 G A); (11858 12245987 ATT A); (11859 12246860 C T); (11860 12247203 T C); (11861
12247707 A T); (11862 12247732 GGTT G); (11863 12248688 G A); (11864 12249426 A G); (11865
12251399 C T); (11866 12251411 G T); (11867 12252112 A G); (11868 12252677 T G); (11869 12252818
A T); (11870 12253222 A AT); (11871 12253371 T C); (11872 12253579 C A); (11873 12253611 A
C); (11874 12253895 T C); (11875 12254071 T C); (11876 12254146 TG T); (11877 12254150 G T); (11878
12255015 A C); (11879 12255161 A T); (11880 12255661 T C); (11881 12255755 C CA); (11882 12255862
A G); (11883 12255901 G A); (11884 12255960 A T); (11885 12256277 T G); (11886 12256452 AT
A); (11887 12256567 T A); (11888 12256886 G A); (11889 12256948 A G); (11890 12257053 C A); (11891
12257289 G A); (11892 12257295 G A); (11893 12257370 G A); (11894 12257397 G A); (11895 12257415
G A); (11896 12257506 T C); (11897 12258121 G C); (11898 12258350 A G); (11899 12258351 T
C); (11900 12258432 G A); (11901 12258508 C T); (11902 12258582 C T); (11903 12258628 A G); (11904
12258743 A ATT); (11905 12258887 T TA); (11906 12259248 T C); (11907 12259304 A G); (11908
12259464 C T); (11909 12259476 C T); (11910 12259477 G A); (11911 12259520 A C); (11912 12261446
C T); (11913 12261717 C T); (11914 12261782 G T); (11915 12262232 T C); (11916 12262619 G A); (11917
12262744 A T); (11918 12262839 C T); (11919 12262991 A G); (11920 12263008 C T); (11921 12263078
A T); (11922 12263216 T G); (11923 12263424 G A); (11924 12263950 T C); (11925 12264121 C
A); (11926 12264179 C T); (11927 12264210 A G); (11928 12264216 T C); (11929 12264261 T A); (11930
12264279 T C); (11931 12264300 G A); (11932 12264858 T G); (11933 12264962 T C); (11934 12265048
C T); (11935 12265800 A G); (11936 12265905 C A); (11937 12266051 C A); (11938 12266270 C
T); (11939 12266287 TA T); (11940 12266828 C T); (11941 12267435 C T); (11942 12267694 T C); (11943
12267793 G A); (11944 12267833 T C); (11945 12267910 A G); (11946 12267961 C T); (11947 12267985
G C); (11948 12268121 G A); (11949 12269313 C T); (11950 12269445 C G); (11951 12269506 C
T); (11952 12269638 G A); (11953 12270045 C T); (11954 12270227 C T); (11955 12270714 C T); (11956
12273624 G A); (11957 12273648 T G); (11958 12273659 G A); (11959 12276687 A G); (11960 12276973
T C); (11961 12277137 T C); (11962 12277204 C T); (11963 12277377 G A); (11964 12277432 C A); (11965
12277507 C T); (11966 12277569 T C); (11967 12277593 G A); (11968 12277718 G A); (11969 12277862
T C); (11970 12278139 G T); (11971 12278185 T C); (11972 12278233 A G); (11973 12278254 T
G); (11974 12278290 A G); (11975 12278364 T C); (11976 12278407 C T); (11977 12278490 G A); (11978
12278497 A G); (11979 12278520 C A); (11980 12279163 C T); (11981 12279308 G A); (11982 12279343
C T); (11983 12279380 G T); (11984 12279471 G A); (11985 12279508 A G); (11986 12279744 C
T); (11987 12279806 T C); (11988 12279979 G C); (11989 12280061 G T); (11990 12280117 G A); (11991
12280356 G T); (11992 12280856 T C); (11993 12280912 C T); (11994 12280920 T G); (11995 12281615
A G); (11996 12281645 G A); (11997 12281735 T C); (11998 12281893 C T); (11999 12281972 T
C); (12000 12282008 T C); (12001 12282164 C T); (12002 12282343 A T); (12003 12283258 G A); (12004
12284592 A C); (12005 12284646 A G); (12006 12285021 A ATC); (12007 12285983 T C); (12008
12286102 A G); (12009 12286240 A G); (12010 12286466 T C); (12011 12286473 G A); (12012 12286486
G A); (12013 12286711 C G); (12014 12287506 G A); (12015 12288933 T A); (12016 12288945 C
T); (12017 12289381 T G); (12018 12290029 C G); (12019 12290432 C T); (12020 12290464 G T); (12021
12290494 A T); (12022 12290507 G A); (12023 12290531 G A); (12024 12290698 C T); (12025 12291063
C A); (12026 12291940 A T); (12027 12292010 C T); (12028 12292051 G A); (12029 12292177 T C); (12030
12292242 A C); (12031 12292255 T C); (12032 12292292 T C); (12033 12292349 T G); (12034 12292600 C
T); (12035 12292833 C T); (12036 12292877 G C); (12037 12293491 T A); (12038 12293537 T C); (12039
12293603 A G); (12040 12293868 T C); (12041 12293881 C T); (12042 12294080 T C); (12043 12294280
A G); (12044 12294344 C T); (12045 12294363 G A); (12046 12294830 C T); (12047 12294862 C
G); (12048 12295353 C T); (12049 12295462 C T); (12050 12295490 T A); (12051 12295680 A G); (12052
12295827 C A); (12053 12296211 T C); (12054 12296333 A G); (12055 12296376 A G); (12056 12296708
A C); (12057 12297294 T A); (12058 12297597 A C); (12059 12297642 T C); (12060 12297729 T G); (12061
12297816 C T); (12062 12298177 G A); (12063 12298558 A G); (12064 12299011 A G); (12065 12299605
A T); (12066 12299677 G A); (12067 12300940 T C); (12068 12301211 G T); (12069 12301300 A
C); (12070 12301964 A AAT); (12071 12302055 A G); (12072 12302560 G A); (12073 12302874 T
A); (12074 12303142 C CA); (12075 12303194 G GA); (12076 12303465 G A); (12077 12303575 A
G); (12078 12303970 T G); (12079 12304436 G T); (12080 12304496 CA C); (12081 12304856 A
G); (12082 12305232 G A); (12083 12305265 G A); (12084 12305605 AT A); (12085 12305748 C
A); (12086 12306084 C T); (12087 12306641 T A); (12088 12307034 C T); (12089 12307649 G A); (12090
12307908 A G); (12091 12308139 G A); (12092 12308266 A G); (12093 12308435 C T); (12094 12308546
A G); (12095 12308571 T C); (12096 12308591 G A); (12097 12308678 G A); (12098 12308689 G
A); (12099 12309255 C T); (12100 12309369 A C); (12101 12309411 T C); (12102 12309453 T C); (12103
12309465 C T); (12104 12309536 G A); (12105 12309577 C T); (12106 12309870 G A); (12107 12309988
A G); (12108 12310809 G A); (12109 12310904 G T); (12110 12311012 T G); (12111 12311555 T
C); (12112 12311811 T TG); (12113 12311874 G T); (12114 12311894 C A); (12115 12312292 T C); (12116
12312472 G T); (12117 12313468 GA G); (12118 12314890 A G); (12119 12314922 C T); (12120
12315170 A G); (12121 12315372 T G); (12122 12315655 T C); (12123 12316127 C A); (12124 12316464
A G); (12125 12316654 A C); (12126 12316926 T A); (12127 12317046 A G); (12128 12317128 G
A); (12129 12317411 T G); (12130 12317580 A ATAAT); (12131 12317814 G A); (12132 12317942 A
G); (12133 12318645 A C); (12134 12318657 G A); (12135 12318687 T A); (12136 12318777 T G); (12137
12319037 C G); (12138 12319286 G A); (12139 12319417 T C); (12140 12319519 T A); (12141 12319759
G A); (12142 12319879 G A); (12143 12320379 G C); (12144 12320469 G A); (12145 12320634 C
T); (12146 12320858 A G); (12147 12320881 A G); (12148 12321083 A G); (12149 12321352 G A); (12150
12321816 C A); (12151 12322033 G A); (12152 12322474 A C); (12153 12322609 G
GACACTTTACTTA); (12154 12322922 T C); (12155 12323025 A G); (12156 12323263 G A); (12157
12323351 T C); (12158 12323701 G A); (12159 12323932 G T); (12160 12324182 G A); (12161 12324292
C CGAATTAATCGATTACAAGTGT); (12162 12324375 G A); (12163 12324393 T C); (12164 12324539 T
C); (12165 12325034 T G); (12166 12326057 C T); (12167 12327278 G A); (12168 12327397 A G); (12169
12327854 A G); (12170 12328474 G A); (12171 12328591 T G); (12172 12328658 G C); (12173 12329151
A G); (12174 12329183 C T); (12175 12329239 C T); (12176 12329266 A G); (12177 12329328 C
T); (12178 12329382 G A); (12179 12329498 C T); (12180 12329571 C T); (12181 12329861 G A); (12182
12330427 G GGCAA); (12183 12331143 GTGAGATAATGGATGTCTGAGA G); (12184 12331150 T
A); (12185 12331355 A G); (12186 12332334 C CA); (12187 12332701 C T); (12188 12332726 G A); (12189
12333089 G C); (12190 12333357 G A); (12191 12334656 T C); (12192 12334909 G C); (12193 12334910
C A); (12194 12335024 T C); (12195 12335439 G A); (12196 12335497 C G); (12197 12335773 A
G); (12198 12335958 C T); (12199 12336160 G A); (12200 12336555 T C); (12201 12336601 C T); (12202
12337276 T C); (12203 12337349 C A); (12204 12337376 G A); (12205 12337527 G A); (12206 12337575
A G); (12207 12337699 G A); (12208 12337744 G T); (12209 12337748 G T); (12210 12337957 T
C); (12211 12338006 T G); (12212 12338128 C T); (12213 12338840 T C); (12214 12339818 A G); (12215
12341541 G A); (12216 12345542 A C); (12217 12347019 G A); (12218 12347296 T C); (12219 12348312
G A); (12220 12348348 T C); (12221 12348356 T C); (12222 12348357 T A); (12223 12348367 C T); (12224
12348369 T G); (12225 12350092 T C); (12226 12350919 A G); (12227 12350933 G A); (12228 12351044
A G); (12229 12351047 A G); (12230 12351126 A G); (12231 12352027 G A); (12232 12352432 G
A); (12233 12352497 A T); (12234 12353411 T C); (12235 12353813 A T); (12236 12354258 A G); (12237
12354298 C T); (12238 12354365 C T); (12239 12354400 G A); (12240 12354478 A G); (12241 12354560
C T); (12242 12354834 C T); (12243 12354849 T C); (12244 12354941 C G); (12245 12355850 T C); (12246
12356205 C T); (12247 12356334 G A); (12248 12356419 A G); (12249 12357031 C T); (12250 12357238
C T); (12251 12357254 A G); (12252 12357554 A G); (12253 12357595 C A); (12254 12357615 G
A); (12255 12357630 G A); (12256 12357901 G A); (12257 12358013 T C); (12258 12358032 A G); (12259
12358938 A C); (12260 12358945 C T); (12261 12359526 G GTTGAGGAGCTCCGCCGTGGCA); (12262
12359888 A G); (12263 12361574 T C); (12264 12361798 A T); (12265 12362262 C T); (12266 12362452
GA G); (12267 12362525 T C); (12268 12363203 C T); (12269 12363278 G T); (12270 12363393 A
G); (12271 12363441 T C); (12272 12363456 C T); (12273 12363578 T A); (12274 12363612 A G); (12275
12363828 T C); (12276 12363989 G A); (12277 12364672 A G); (12278 12364731 G A); (12279 12365515
A G); (12280 12365813 T C); (12281 12365816 G A); (12282 12366662 G A); (12283 12367006 T
A); (12284 12367055 T C); (12285 12367263 A G); (12286 12367491 T C); (12287 12367914 C T); (12288
12367919 A C); (12289 12368089 T C); (12290 12368248 C T); (12291 12368265 C A); (12292 12368919 C
T); (12293 12368927 G A); (12294 12369026 C T); (12295 12369080 G C); (12296 12369141 G A); (12297
12369163 G T); (12298 12369232 G A); (12299 12369233 G A); (12300 12369505 T C); (12301 12369541
T C); (12302 12369754 A G); (12303 12369760 T C); (12304 12370029 A T); (12305 12370874 C T); (12306
12370895 C T); (12307 12370906 C T); (12308 12371180 T G); (12309 12371189 T C); (12310 12371458
G A); (12311 12371722 C T); (12312 12371985 C T); (12313 12372281 A G); (12314 12372310 GA
G); (12315 12372596 G A); (12316 12372742 G T); (12317 12373236 A G); (12318 12373605 G T); (12319
12373744 G A); (12320 12373753 G T); (12321 12373774 G A); (12322 12373873 G A); (12323 12373903
A C); (12324 12374060 C T); (12325 12374268 C T); (12326 12374415 C T); (12327 12374450 C T); (12328
12374528 T A); (12329 12374766 G T); (12330 12375388 A G); (12331 12375501 A G); (12332 12375735
G A); (12333 12375858 C T); (12334 12375958 T C); (12335 12376683 C T); (12336 12377128 T C); (12337
12378279 A G); (12338 12379241 A G); (12339 12379380 T C); (12340 12379997 G T); (12341 12380906
G T); (12342 12381031 G A); (12343 12381157 C G); (12344 12381203 A G); (12345 12381205 T
G); (12346 12381372 C T); (12347 12381454 C T); (12348 12381701 A G); (12349 12381717 T C); (12350
12381900 G T); (12351 12382101 C T); (12352 12382204 C T); (12353 12382263 C T); (12354 12382417
G A); (12355 12382456 C T); (12356 12382494 C A); (12357 12382610 T A); (12358 12382776 G
A); (12359 12382778 A G); (12360 12382846 A G); (12361 12383194 G A); (12362 12383195 G A); (12363
12383196 G A); (12364 12383211 A G); (12365 12383371 G C); (12366 12383477 G A); (12367 12383489
T C); (12368 12383504 A G); (12369 12383685 T A); (12370 12383869 A G); (12371 12384061 G
A); (12372 12384183 C T); (12373 12384234 A C); (12374 12384245 C T); (12375 12384434 G A); (12376
12384594 A T); (12377 12385085 A C); (12378 12385123 C T); (12379 12385255 G A); (12380 12385257
T C); (12381 12385338 G A); (12382 12385340 T C); (12383 12385482 A C); (12384 12386153 A
C); (12385 12386187 C T); (12386 12386206 G T); (12387 12386322 C A); (12388 12386593 C A); (12389
12386719 A G); (12390 12386851 T G); (12391 12387011 C T); (12392 12387148 A G); (12393 12387167
C T); (12394 12387297 G A); (12395 12387649 A C); (12396 12387655 A G); (12397 12388001 G
A); (12398 12388050 G A); (12399 12388063 G A); (12400 12388130 A G); (12401 12388537 G A); (12402
12388691 T G); (12403 12388719 A AATT); (12404 12388791 A G); (12405 12389613 T C); (12406
12389765 G T); (12407 12389776 G A); (12408 12389777 T C); (12409 12389798 G A); (12410 12389828
A G); (12411 12389829 C T); (12412 12389972 A C); (12413 12389979 T A); (12414 12390139 G
A); (12415 12390631 G T); (12416 12390811 A G); (12417 12390938 G T); (12418 12391392 C T); (12419
12391488 C G); (12420 12391612 C T); (12421 12391650 T C); (12422 12391920 A G); (12423 12391986
A G); (12424 12392006 A G); (12425 12392196 C T); (12426 12392213 A G); (12427 12393258 A
G); (12428 12393698 C T); (12429 12393705 T C); (12430 12393752 T G); (12431 12393755 A C); (12432
12393761 T G); (12433 12394002 G A); (12434 12394234 G A); (12435 12394251 G T); (12436 12394305
G C); (12437 12394667 T C); (12438 12395175 A G); (12439 12395589 A C); (12440 12395763 T
C); (12441 12396621 G A); (12442 12396655 A G); (12443 12396674 G A); (12444 12396734 C T); (12445
12397061 T A); (12446 12397315 C G); (12447 12397438 G A); (12448 12397808 G A); (12449 12397839
A G); (12450 12397864 T C); (12451 12397867 T G); (12452 12398236 T C); (12453 12399657 C T); (12454
12399663 G T); (12455 12399693 G A); (12456 12399838 T C); (12457 12400374 G A); (12458 12400574
T C); (12459 12400789 A G); (12460 12400898 G A); (12461 12400990 T C); (12462 12401111 G
A); (12463 12401295 T C); (12464 12401535 A G); (12465 12402193 T A); (12466 12402194 C T); (12467
12402280 C T); (12468 12402332 G A); (12469 12402363 C A); (12470 12402369 G C); (12471 12402431
A G); (12472 12402442 G A); (12473 12402507 G A); (12474 12402513 A G); (12475 12402533 T
C); (12476 12402699 G A); (12477 12402800 C T); (12478 12402821 T C); (12479 12402893 A G); (12480
12402957 A G); (12481 12402970 T C); (12482 12403001 C T); (12483 12403018 G A); (12484 12403040
C T); (12485 12403069 T C); (12486 12403070 T G); (12487 12403071 A C); (12488 12403109 C T); (12489
12403172 C A); (12490 12403379 G A); (12491 12403496 G T); (12492 12403547 C T); (12493 12403673
G A); (12494 12403682 A G); (12495 12403899 G A); (12496 12404555 C T); (12497 12404698 T
C); (12498 12404811 T C); (12499 12404907 C T); (12500 12404910 C T); (12501 12405099 T A); (12502
12405151 G A); (12503 12405170 A G); (12504 12405172 C T); (12505 12405573 G A); (12506 12405830
C T); (12507 12406259 G C); (12508 12406435 A C); (12509 12406445 G A); (12510 12406763 T
A); (12511 12406777 C T); (12512 12406911 T A); (12513 12407068 A G); (12514 12407186 G A); (12515
12407419 G A); (12516 12407492 T C); (12517 12407498 T C); (12518 12407533 A G); (12519 12407595
G A); (12520 12409138 A G); (12521 12410061 G A); (12522 12410233 C T); (12523 12410296 G
A); (12524 12411181 T C); (12525 12411389 A C); (12526 12411431 C T); (12527 12412014 C T); (12528
12412091 A C); (12529 12412300 G A); (12530 12412686 C T); (12531 12412725 G A); (12532 12412995
A C); (12533 12413408 T G); (12534 12413797 C T); (12535 12413975 T C); (12536 12414204 C A); (12537
12414248 G A); (12538 12415243 T C); (12539 12415346 C T); (12540 12415480 T C); (12541 12416299 T
C); (12542 12416321 AC A); (12543 12416595 T A); (12544 12416895 T C); (12545 12417326 G A); (12546
12417801 G A); (12547 12418394 C T); (12548 12418453 G A); (12549 12418985 T G); (12550 12419179
A G); (12551 12419303 T G); (12552 12419574 C CGCGCTATCGCGCGGGGTTAA); (12553 12422407 G
A); (12554 12422622 A G); (12555 12422971 C T); (12556 12423040 T G); (12557 12423170 C T); (12558
12423571 G A); (12559 12423655 G A); (12560 12423816 C T); (12561 12424098 A G); (12562 12425479
G T); (12563 12425517 G A); (12564 12426300 A G); (12565 12426429 A G); (12566 12426474 G
A); (12567 12426494 A G); (12568 12427010 T A); (12569 12427088 T G); (12570 12427098 T G); (12571
12427628 C A); (12572 12428222 A G); (12573 12428516 T C); (12574 12428534 T C); (12575 12428553
A G); (12576 12428581 G A); (12577 12428824 T C); (12578 12430053 G T); (12579 12430400 A
G); (12580 12430556 C T); (12581 12430956 G T); (12582 12431112 C T); (12583 12431235 A G); (12584
12431781 G A); (12585 12431807 C T); (12586 12431867 G A); (12587 12431923 C T); (12588 12432340
C G); (12589 12432655 C T); (12590 12432790 T C); (12591 12433448 C T); (12592 12433490 T C); (12593
12433690 A T); (12594 12433759 G A); (12595 12434002 G C); (12596 12434034 T C); (12597 12434753
G C); (12598 12434793 A G); (12599 12434903 A G); (12600 12434924 A G); (12601 12435640 C
T); (12602 12435669 T C); (12603 12435818 A C); (12604 12435930 C A); (12605 12436097 T C); (12606
12436285 T C); (12607 12436327 T C); (12608 12436468 T C); (12609 12436493 A G); (12610 12436541
A G); (12611 12436608 A C); (12612 12436609 A C); (12613 12437267 T C); (12614 12437327 T
C); (12615 12437415 A T); (12616 12437772 A G); (12617 12438092 T C); (12618 12438230 C A); (12619
12438452 A G); (12620 12438714 A G); (12621 12439305 A G); (12622 12439360 C T); (12623 12439568
A T); (12624 12440271 T C); (12625 12440575 T C); (12626 12440645 G C); (12627 12442323 C T); (12628
12442375 ATCGAT A); (12629 12442437 C T); (12630 12442481 C T); (12631 12442597 G A); (12632
12443008 C A); (12633 12443118 T A); (12634 12443172 A G); (12635 12444185 G T); (12636 12444377
A C); (12637 12444455 T G); (12638 12444560 T TAG); (12639 12444736 A AACACTATG); (12640
12445026 T G); (12641 12445491 T C); (12642 12446159 C T); (12643 12446196 T C); (12644 12447016 A
C); (12645 12447219 T C); (12646 12447590 A T); (12647 12448253 C T); (12648 12448439 A T); (12649
12448673 A T); (12650 12448689 G A); (12651 12448695 T C); (12652 12448840 C T); (12653 12449423 T
C); (12654 12449948 G A); (12655 12450497 C G); (12656 12450681 G A); (12657 12451333 T A); (12658
12451336 A G); (12659 12451382 T G); (12660 12451557 TA T); (12661 12451573 G A); (12662
12451632 A T); (12663 12451677 A G); (12664 12451725 A G); (12665 12451875 A T); (12666 12452180
GA); (12667 12452250 G T); (12668 12452308 G A); (12669 12452311 T G); (12670 12452366 T
G); (12671 12452368 GT G); (12672 12452386 G A); (12673 12452398 T G); (12674 12452399 G
A); (12675 12452506 T A); (12676 12452523 C T); (12677 12452567 T C); (12678 12452626 A G); (12679
12453018 C T); (12680 12453043 T A); (12681 12453291 G A); (12682 12453456 C T); (12683 12453478
C T); (12684 12453505 G A); (12685 12453506 T C); (12686 12453706 A G); (12687 12457227 T
A); (12688 12457346 A G); (12689 12457372 G A); (12690 12457408 T TA); (12691 12457616 A
G); (12692 12457905 A T); (12693 12457916 G T); (12694 12458180 A G); (12695 12458460 G A); (12696
12458706 G A); (12697 12458723 TA T); (12698 12458786 T A); (12699 12459571 G A); (12700
12459758 C T); (12701 12460914 C T); (12702 12461654 T G); (12703 12461780 AC A); (12704 12461784
CA C); (12705 12461964 G A); (12706 12462000 G A); (12707 12463779 TC T); (12708 12464403 C
T); (12709 12464599 CT C); (12710 12465583 A G); (12711 12466232 C A); (12712 12466655 T G); (12713
12466656 A G); (12714 12466722 G T); (12715 12467121 A G); (12716 12467259 T G); (12717 12467281
C G); (12718 12467700 A G); (12719 12467803 C T); (12720 12467833 G A); (12721 12468277 C
T); (12722 12468632 G A); (12723 12468766 A C); (12724 12468987 A T); (12725 12469166 A G); (12726
12469396 A G); (12727 12469994 T G); (12728 12470507 A G); (12729 12471193 G A); (12730 12471438
T C); (12731 12471458 TTGA T); (12732 12471485 C A); (12733 12471853 C T); (12734 12471937 T
C); (12735 12472024 T C); (12736 12472054 C A); (12737 12472079 T G); (12738 12472267 G A); (12739
12472415 T C); (12740 12472503 A G); (12741 12472595 T C); (12742 12472741 C T); (12743 12473457
A AT); (12744 12473877 T A); (12745 12473879 G A); (12746 12473903 T A); (12747 12473979 A
G); (12748 12474668 T G); (12749 12474707 T C); (12750 12474829 C G); (12751 12474840 C T); (12752
12474853 G A); (12753 12475060 A G); (12754 12476409 C G); (12755 12476622 C T); (12756 12476657
T G); (12757 12476855 A G); (12758 12476953 G A); (12759 12477548 C T); (12760 12477716 A
C); (12761 12477909 T G); (12762 12478449 G A); (12763 12479212 A G); (12764 12479362 C T); (12765
12479409 T TA); (12766 12479429 A G); (12767 12479642 C G); (12768 12479667 A G); (12769
12479730 T A); (12770 12480038 C T); (12771 12480265 G A); (12772 12480309 T G); (12773 12480525
C T); (12774 12480607 G T); (12775 12480882 T C); (12776 12481033 T C); (12777 12481131 T C); (12778
12481223 T G); (12779 12481386 A G); (12780 12481931 T G); (12781 12482066 C T); (12782 12482069
A G); (12783 12482189 A C); (12784 12482365 G A); (12785 12482366 C T); (12786 12482370 G
A); (12787 12482450 G A); (12788 12482718 C T); (12789 12482855 G A); (12790 12482909 T A); (12791
12482941 G A); (12792 12483094 T C); (12793 12483157 G T); (12794 12483196 G A); (12795 12483301
T C); (12796 12483331 C T); (12797 12483333 T C); (12798 12483341 G A); (12799 12483360 A
G); (12800 12483388 A G); (12801 12483604 A G); (12802 12483645 T G); (12803 12483792 C T); (12804
12484211 G C); (12805 12484373 A G); (12806 12484533 G A); (12807 12484626 C T); (12808 12484716
A G); (12809 12484783 C T); (12810 12485076 A G); (12811 12485119 T C); (12812 12485143 C
T); (12813 12485233 G A); (12814 12485465 G A); (12815 12485874 T C); (12816 12486141 T C); (12817
12486266 A G); (12818 12486314 T C); (12819 12486396 T C); (12820 12486457 T C); (12821 12486701 C
T); (12822 12486791 C T); (12823 12486974 A AT); (12824 12487039 G A); (12825 12487109 G A); (12826
12487126 C T); (12827 12487166 C T); (12828 12487299 C T); (12829 12487343 T C); (12830 12487656 T
C); (12831 12487709 G A); (12832 12488343 G A); (12833 12489015 C T); (12834 12489174 G T); (12835
12489294 A G); (12836 12489516 C T); (12837 12489517 A G); (12838 12489529 C G); (12839 12489550
G A); (12840 12489649 A G); (12841 12489701 T C); (12842 12489721 C T); (12843 12489761 A
G); (12844 12489762 C T); (12845 12489960 T C); (12846 12490013 G A); (12847 12490099 C G); (12848
12490149 G A); (12849 12490235 CAGG C); (12850 12490465 T A); (12851 12490601 C A); (12852
12490626 A G); (12853 12490668 T C); (12854 12490765 T C); (12855 12490841 G A); (12856 12490981
A AC); (12857 12491246 G A); (12858 12491406 T G); (12859 12491746 G A); (12860 12491769 T
C); (12861 12491922 TA T); (12862 12491945 C T); (12863 12492202 G A); (12864 12492363 A G); (12865
12492781 A C); (12866 12493525 T G); (12867 12493910 G A); (12868 12494134 G T); (12869 12494172
G A); (12870 12494288 G T); (12871 12494462 G GA); (12872 12494954 G A); (12873 12495632 T
C); (12874 12495844 T A); (12875 12496334 T A); (12876 12496366 A T); (12877 12496427 C A); (12878
12496438 A G); (12879 12496485 C T); (12880 12496529 G C); (12881 12496636 T C); (12882 12497009
G A); (12883 12497559 C G); (12884 12497799 T C); (12885 12498741 G A); (12886 12499937 GA
G); (12887 12501088 C T); (12888 12501177 C T); (12889 12502170 T C); (12890 12502505 G A); (12891
12502534 A C); (12892 12502588 G A); (12893 12502927 C T); (12894 12503033 T G); (12895 12503909
T G); (12896 12504064 C T); (12897 12504722 G A); (12898 12504984 C T); (12899 12505236 C T); (12900
12505343 G A); (12901 12505378 A G); (12902 12505429 G A); (12903 12505505 C T); (12904 12505943
T G); (12905 12506139 G A); (12906 12506988 A G); (12907 12507244 G A); (12908 12507422 C
T); (12909 12507533 A G); (12910 12507538 C T); (12911 12507614 T A); (12912 12507681 T C); (12913
12507736 G A); (12914 12507906 G A); (12915 12508184 A G); (12916 12508302 C T); (12917 12508413
A G); (12918 12508524 C G); (12919 12508733 AAGC A); (12920 12508772 T G); (12921 12509686 A
G); (12922 12509758 A G); (12923 12510609 G T); (12924 12510705 T G); (12925 12511072 C T); (12926
12511171 A T); (12927 12511345 G A); (12928 12511382 A G); (12929 12511417 G A); (12930 12511442
T C); (12931 12511462 T C); (12932 12512629 G A); (12933 12512786 T C); (12934 12512885 C T); (12935
12513203 A G); (12936 12513291 T C); (12937 12513480 A G); (12938 12513796 T A); (12939 12514035
T A); (12940 12514071 T C); (12941 12514162 A G); (12942 12514166 C T); (12943 12514525
TTATTTGCATATTGA T); (12944 12514609 G A); (12945 12514645 T C); (12946 12515008 T C); (12947
12515151 G A); (12948 12515278 A G); (12949 12515894 A G); (12950 12516057 G A); (12951 12517109
T C); (12952 12517309 G A); (12953 12517327 T A); (12954 12517882 G T); (12955 12518091 G
A); (12956 12518301 T C); (12957 12518324 A T); (12958 12518667 C T); (12959 12518928 T C); (12960
12519041 T C); (12961 12519418 C T); (12962 12519891 C A); (12963 12519924 A G); (12964 12520064
G A); (12965 12520473 A G); (12966 12520580 C A); (12967 12520766 C T); (12968 12520827 C
A); (12969 12520907 A C); (12970 12521106 C T); (12971 12521296 C T); (12972 12521803 A G); (12973
12521884 A G); (12974 12521990 T C); (12975 12522500 C T); (12976 12522788 C CT); (12977 12522906
C T); (12978 12522980 T C); (12979 12523589 T C); (12980 12523624 G A); (12981 12523852 T C); (12982
12524031 A T); (12983 12524809 C T); (12984 12524889 C T); (12985 12525320 A G); (12986 12525450
A G); (12987 12525591 T C); (12988 12525613 G A); (12989 12525669 A C); (12990 12525759 C
T); (12991 12525813 G A); (12992 12525950 G A); (12993 12526145 CCATATTGAAA C); (12994 12526434
A G); (12995 12526624 T C); (12996 12526641 A G); (12997 12526654 T C); (12998 12526735 A
G); (12999 12527272 C T); (13000 12527522 G A); (13001 12527557 G A); (13002 12527666 A G); (13003
12527708 G A); (13004 12527918 G A); (13005 12528052 T A); (13006 12528198 G A); (13007 12528593
T A); (13008 12529121 C T); (13009 12529783 G A); (13010 12529927 G C); (13011 12530091 C
T); (13012 12530668 A C); (13013 12530744 G C); (13014 12530783 G C); (13015 12531039 C T); (13016
12531094 T C); (13017 12531184 G A); (13018 12531407 C T); (13019 12531686 A T); (13020 12531729
A G); (13021 12532447 T C); (13022 12532518 T G); (13023 12532908 G T); (13024 12532974 G
A); (13025 12533054 T C); (13026 12533073 C T); (13027 12533112 A AT); (13028 12535088 C A); (13029
12536050 A G); (13030 12536213 A G); (13031 12538735 A G); (13032 12538870 TA T); (13033
12538888 AT A); (13034 12539001 C T); (13035 12539136 A C); (13036 12539537 C A); (13037 12539579
A G); (13038 12539845 A G); (13039 12539883 A G); (13040 12539991 G A); (13041 12540052 A
G); (13042 12540077 A G); (13043 12541186 C T); (13044 12541333 C T); (13045 12541874 C T); (13046
12541908 G A); (13047 12541968 A G); (13048 12541978 G A); (13049 12542038 T G); (13050 12544316
G A); (13051 12545777 A G); (13052 12549725 T C); (13053 12551985 G A); (13054 12552149 A
G); (13055 12552316 A G); (13056 12552394 G A); (13057 12552408 G T); (13058 12552672 T C); (13059
12552983 T C); (13060 12552984 T C); (13061 12552991 T C); (13062 12553151 A C); (13063 12553173 G
A); (13064 12553312 C T); (13065 12553383 T C); (13066 12553459 A G); (13067 12553791 T G); (13068
12553869 AT A); (13069 12554394 T C); (13070 12554513 C T); (13071 12554535 C G); (13072 12554760
GT G); (13073 12554783 A T); (13074 12554953 C A); (13075 12555008 T A); (13076 12555241 C
A); (13077 12556151 C T); (13078 12556181 G A); (13079 12556215 T A); (13080 12556226 T C); (13081
12556284 T C); (13082 12556890 C T); (13083 12556909 C T); (13084 12556976 C G); (13085 12557203 T
C); (13086 12557325 T C); (13087 12557378 T C); (13088 12557571 G T); (13089 12557632 A G); (13090
12557749 G A); (13091 12557769 G A); (13092 12558891 G T); (13093 12558893 G T); (13094 12558975
C A); (13095 12559228 C T); (13096 12559241 G T); (13097 12559295 C T); (13098 12559619 T G); (13099
12559905 G T); (13100 12559930 T C); (13101 12560190 T C); (13102 12560271 C G); (13103 12560309
T A); (13104 12560383 C A); (13105 12560388 T C); (13106 12560760 C A); (13107 12561046 G
A); (13108 12561571 G A); (13109 12561690 G A); (13110 12561842 A C); (13111 12561844 A C); (13112
12561846 A C); (13113 12561848 A C); (13114 12561870 G GTC); (13115 12561920 A G); (13116
12562043 T C); (13117 12562158 A G); (13118 12562359 T C); (13119 12562929 C A); (13120 12563176
T C); (13121 12566186 C T); (13122 12567345 A G); (13123 12567470 A C); (13124 12567608 A
G); (13125 12567790 A G); (13126 12567814 G A); (13127 12568040 C T); (13128 12568246 T C); (13129
12568791 G A); (13130 12568800 G A); (13131 12568841 G T); (13132 12568918 C T); (13133 12569449
G A); (13134 12569453 A G); (13135 12570129 T C); (13136 12570247 A G); (13137 12570854 A
G); (13138 12570901 T C); (13139 12571090 C T); (13140 12571343 G C); (13141 12571438 T C); (13142
12571638 C T); (13143 12571748 T C); (13144 12571899 C T); (13145 12572055 G C); (13146 12572576 A
C); (13147 12573067 T A); (13148 12573076 A G); (13149 12573149 C G); (13150 12573759 A C); (13151
12574217 A G); (13152 12574829 T G); (13153 12574980 G C); (13154 12575138 C T); (13155 12575196
A G); (13156 12575668 G GAAGGTCGAAAATGAATTA); (13157 12575888 G C); (13158 12576135 G
C); (13159 12576181 T C); (13160 12576740 C T); (13161 12577169 G A); (13162 12577970 C A); (13163
12578069 A G); (13164 12578178 C T); (13165 12578728 G A); (13166 12578959 C T); (13167 12579001
A G); (13168 12579126 C G); (13169 12579608 G C); (13170 12579780 A G); (13171 12579802 A
G); (13172 12579879 G A); (13173 12580174 A G); (13174 12580404 C A); (13175 12580420 A T); (13176
12580700 T G); (13177 12580867 A T); (13178 12581408 A G); (13179 12581499 T A); (13180 12581748
C T); (13181 12581834 G T); (13182 12581929 T C); (13183 12582074 A G); (13184 12582287 T
G); (13185 12582490 A G); (13186 12582864 T G); (13187 12583013 AT A); (13188 12583102 A
ATGTGTTTC); (13189 12583236 T A); (13190 12583278 C T); (13191 12583352 T C); (13192 12583999 T
C); (13193 12584235 A G); (13194 12584364 A G); (13195 12584501 TG T); (13196 12584574 A
G); (13197 12584957 T C); (13198 12585238 A C); (13199 12585912 C T); (13200 12585951 C T); (13201
12586856 T C); (13202 12586968 G A); (13203 12587911 C T); (13204 12588008 AT A); (13205 12588066
T C); (13206 12588680 G A); (13207 12588681 A G); (13208 12589266 A G); (13209 12589401 T
C); (13210 12589619 A C); (13211 12589675 A G); (13212 12589830 C T); (13213 12590327 T A); (13214
12590682 T TA); (13215 12591338 C T); (13216 12591380 A G); (13217 12591587 G T); (13218 12591795
G A); (13219 12591947 T G); (13220 12592065 T C); (13221 12592212 A G); (13222 12592783 T
A); (13223 12592797 A T); (13224 12593850 C G); (13225 12594112 A G); (13226 12594319 A T); (13227
12594386 G C); (13228 12594785 C T); (13229 12594923 G A); (13230 12594937 T C); (13231 12594968
A G); (13232 12595208 T C); (13233 12595254 T G); (13234 12595257 AAG A); (13235 12595684 G
A); (13236 12595804 A G); (13237 12596075 T C); (13238 12596115 G A); (13239 12596321 C T); (13240
12596541 T C); (13241 12596555 C T); (13242 12597096 T C); (13243 12597529 C T); (13244 12597545 C
T); (13245 12597855 T G); (13246 12598066 A G); (13247 12598193 C A); (13248 12598217 G A); (13249
12598442 G A); (13250 12598503 A G); (13251 12598626 A G); (13252 12598639 A C); (13253 12598726
T C); (13254 12598848 G A); (13255 12599383 G A); (13256 12600004 G A); (13257 12600163 G
A); (13258 12600489 C T); (13259 12600773 G T); (13260 12601089 T G); (13261 12601146 G A); (13262
12601336 T C); (13263 12601469 T C); (13264 12601794 T A); (13265 12602010 T A); (13266 12602188 C
A); (13267 12602806 G GA); (13268 12602874 C A); (13269 12603548 A C); (13270 12603617 G
A); (13271 12603697 A AT); (13272 12603711 G T); (13273 12603928 A G); (13274 12603988 T G); (13275
12604186 CA C); (13276 12604465 C G); (13277 12604881 A AT); (13278 12605616 T C); (13279
12606352 G A); (13280 12606596 C A); (13281 12606870 A T); (13282 12606928 G A); (13283 12607051
T C); (13284 12607146 C A); (13285 12607301 A T); (13286 12607344 G A); (13287 12607571 A
C); (13288 12607642 A G); (13289 12608405 T G); (13290 12608747 TC T); (13291 12608756 A C); (13292
12608841 C T); (13293 12609015 T A); (13294 12609102 T A); (13295 12609626 G A); (13296 12610006
T C); (13297 12610067 T C); (13298 12610095 A C); (13299 12610112 AT A); (13300 12610274 A
G); (13301 12611135 G A); (13302 12611196 T C); (13303 12611291 G A); (13304 12611558 C T); (13305
12611626 G A); (13306 12611783 A G); (13307 12611800 T A); (13308 12612165 A G); (13309 12612369
G T); (13310 12612427 A G); (13311 12612791 T C); (13312 12613013 T G); (13313 12613212 T
C); (13314 12613831 A T); (13315 12613988 C T); (13316 12615097 T C); (13317 12615108 T C); (13318
12615116 G T); (13319 12615469 T G); (13320 12615659 T A); (13321 12615685 C T); (13322 12616376
G A); (13323 12616569 C T); (13324 12616713 A G); (13325 12616728 A C); (13326 12616806 G
A); (13327 12617021 C T); (13328 12617423 C T); (13329 12617841 C T); (13330 12617843 T C); (13331
12618238 T C); (13332 12618453 C T); (13333 12618524 C T); (13334 12619028 T C); (13335 12619045 A
G); (13336 12619216 T C); (13337 12619284 C T); (13338 12619429 A G); (13339 12619431 C T); (13340
12619567 G A); (13341 12619734 C A); (13342 12619877 G A); (13343 12619989 G A); (13344 12620575
G A); (13345 12621722 G A); (13346 12621767 A T); (13347 12621787 T C); (13348 12621790 T
C); (13349 12622014 A G); (13350 12622039 A G); (13351 12622152 G A); (13352 12622905 A G); (13353
12622917 C T); (13354 12622943 T C); (13355 12622961 A G); (13356 12623302 A T); (13357 12623319 T
C); (13358 12623398 A G); (13359 12624481 G A); (13360 12624627 G T); (13361 12625220 G A); (13362
12625565 C T); (13363 12626036 A T); (13364 12626801 T C); (13365 12627005 G A); (13366 12627006 T
C); (13367 12627061 T C); (13368 12627188 C T); (13369 12627240 G A); (13370 12627245 A G); (13371
12627355 C T); (13372 12627682 A G); (13373 12627776 A G); (13374 12627813 A T); (13375 12627953
G T); (13376 12628533 T C); (13377 12628556 C T); (13378 12628557 A G); (13379 12629032 G
A); (13380 12629041 T A); (13381 12629797 C T); (13382 12629951 C T); (13383 12629998 G A); (13384
12630167 G A); (13385 12630772 G T); (13386 12631478 C T); (13387 12631796 C T); (13388 12632041
G A); (13389 12632434 C T); (13390 12632510 A G); (13391 12632667 C T); (13392 12633094 C
T); (13393 12633395 A G); (13394 12633768 A C); (13395 12633931 G A); (13396 12634448 C A); (13397
12634844 A G); (13398 12634858 T C); (13399 12634892 T C); (13400 12635043 TG T); (13401 12635064
A T); (13402 12635182 T C); (13403 12635231 G T); (13404 12635583 T C); (13405 12635648 T C); (13406
12635776 AAG A); (13407 12635803 A G); (13408 12637103 G C); (13409 12637396 CT C); (13410
12637551 C A); (13411 12638342 T C); (13412 12638656 T C); (13413 12639029 A G); (13414 12639210
C T); (13415 12639298 G T); (13416 12639537 T C); (13417 12639599 C A); (13418 12639679 C T); (13419
12639781 C T); (13420 12640041 T C); (13421 12640417 A G); (13422 12640495 A G); (13423 12640708
G A); (13424 12640719 T C); (13425 12641447 T C); (13426 12641593 G C); (13427 12641665 G
A); (13428 12641811 C T); (13429 12642874 T C); (13430 12643281 A G); (13431 12643497 G T); (13432
12643737 T C); (13433 12643745 T C); (13434 12643958 C A); (13435 12644077 T C); (13436 12644408 C
T); (13437 12644759 T C); (13438 12646655 A G); (13439 12646758 T C); (13440 12647787 C T); (13441
12648573 C T); (13442 12648712 A G); (13443 12650077 C T); (13444 12650337 A G); (13445 12650425
C T); (13446 12650707 C A); (13447 12652088 T C); (13448 12653056 G A); (13449 12655916 C
A); (13450 12656801 G T); (13451 12656859 T TTA); (13452 12656965 T C); (13453 12657217 C
T); (13454 12657304 C T); (13455 12657386 G A); (13456 12658302 T C); (13457 12658498 A G); (13458
12658499 A C); (13459 12659257 C T); (13460 12660859 A T); (13461 12660906 G A); (13462 12661188
A C); (13463 12661809 G GT); (13464 12661811 T C); (13465 12662687 G A); (13466 12666964 G
T); (13467 12667603 T C); (13468 12667711 C T); (13469 12668023 C T); (13470 12668241 G A); (13471
12668775 G A); (13472 12668798 A G); (13473 12669948 C A); (13474 12670591 C A); (13475 12670790
G A); (13476 12671222 G A); (13477 12671424 T C); (13478 12671505 G A); (13479 12671639 T
C); (13480 12671832 C T); (13481 12671993 T C); (13482 12672504 T C); (13483 12672628 A C); (13484
12672759 T C); (13485 12672766 C G); (13486 12673007 A G); (13487 12673010 T C); (13488 12673041
C T); (13489 12673090 T C); (13490 12673182 A G); (13491 12673191 G A); (13492 12673274 C
T); (13493 12673519 C T); (13494 12673642 C T); (13495 12673845 G A); (13496 12673999 T C); (13497
12674029 G A); (13498 12674048 A T); (13499 12674396 A G); (13500 12674495 G A); (13501 12674523
G A); (13502 12674525 T C); (13503 12674641 T TGA); (13504 12674668 A G); (13505 12674736 G
T); (13506 12674743 C T); (13507 12674851 G A); (13508 12674891 T A); (13509 12674935 A G); (13510
12675184 C T); (13511 12675198 A G); (13512 12675431 G C); (13513 12675444 A G); (13514 12675824
C G); (13515 12675834 G T); (13516 12676060 G A); (13517 12676612 T C); (13518 12676617 C
A); (13519 12676711 G A); (13520 12676832 A G); (13521 12677162 G A); (13522 12677164 T C); (13523
12677242 A G); (13524 12677248 A G); (13525 12677678 T C); (13526 12677703 T G); (13527 12677722
G A); (13528 12677940 G A); (13529 12678423 C T); (13530 12678437 C G); (13531 12678475 C
T); (13532 12680007 C T); (13533 12680088 C T); (13534 12680099 A G); (13535 12680452 T G); (13536
12680514 A G); (13537 12680537 T G); (13538 12680558 G T); (13539 12680561 G A); (13540 12680572
C T); (13541 12680707 A G); (13542 12681190 C T); (13543 12681224 G A); (13544 12681507 T
C); (13545 12682083 C T); (13546 12682107 G A); (13547 12682113 T C); (13548 12682216 G A); (13549
12682319 G A); (13550 12683878 C A); (13551 12684298 G A); (13552 12684360 C T); (13553 12684740
G A); (13554 12684854 A G); (13555 12684924 C G); (13556 12685033 T C); (13557 12685344 C
T); (13558 12686103 C G); (13559 12686203 A T); (13560 12686309 A G); (13561 12686315 A C); (13562
12687064 G A); (13563 12687662 G A); (13564 12687947 C T); (13565 12687990 T C); (13566 12688111
C T); (13567 12688361 T C); (13568 12688370 G GA); (13569 12688373 C T); (13570 12688464 T
C); (13571 12688473 C T); (13572 12688519 T C); (13573 12688696 G A); (13574 12688711 C G); (13575
12688793 T C); (13576 12689178 A G); (13577 12689190 A G); (13578 12689581 T C); (13579 12689594
G A); (13580 12689698 T C); (13581 12689737 G A); (13582 12690057 C T); (13583 12690072 C
T); (13584 12690146 G A); (13585 12690172 C T); (13586 12690216 T C); (13587 12690395 C T); (13588
12690514 A G); (13589 12691970 G A); (13590 12695766 T C); (13591 12695805 C T); (13592 12695831
T A); (13593 12696078 C A); (13594 12696125 T C); (13595 12696132 C T); (13596 12699226 T C); (13597
12701152 A G); (13598 12701989 T C); (13599 12702055 G A); (13600 12702190 G A); (13601 12706281
G A); (13602 12706341 G A); (13603 12706416 A G); (13604 12706560 G A); (13605 12706901 A
G); (13606 12710977 T C); (13607 12711005 G A); (13608 12711389 G A); (13609 12711594 C T); (13610
12711845 A C); (13611 12711934 A C); (13612 12712111 G A); (13613 12712522 A G); (13614 12712688
G A); (13615 12714311 C T); (13616 12714413 C G); (13617 12714485 T C); (13618 12714618 T
G); (13619 12715401 C T); (13620 12715476 T C); (13621 12715583 C G); (13622 12715601 A AG); (13623
12715779 A C); (13624 12716136 A G); (13625 12716319 T A); (13626 12716367 G A); (13627 12718100
C T); (13628 12718191 G A); (13629 12718515 TAA T); (13630 12718851 G A); (13631 12720279 T
C); (13632 12720682 A T); (13633 12720930 T A); (13634 12721135 G A); (13635 12721211 G T); (13636
12721609 C T); (13637 12721681 A G); (13638 12721997 G A); (13639 12722485 A T); (13640 12722608
A G); (13641 12723483 T C); (13642 12723546 C A); (13643 12723811 C A); (13644 12723926 G
A); (13645 12723964 G A); (13646 12723983 C T); (13647 12724233 T C); (13648 12724261 G A); (13649
12724412 G A); (13650 12724985 T G); (13651 12725276 C T); (13652 12725594 C T); (13653 12725655
G A); (13654 12725709 T C); (13655 12725717 A G); (13656 12725818 T G); (13657 12725841 G
A); (13658 12725888 C T); (13659 12725897 C T); (13660 12725899 A G); (13661 12726139 G A); (13662
12726569 G A); (13663 12726649 T C); (13664 12727040 A G); (13665 12727582 T C); (13666 12727929
G A); (13667 12728330 G T); (13668 12729417 T C); (13669 12729431 G A); (13670 12729522 G
A); (13671 12729973 C T); (13672 12730181 G A); (13673 12730265 A G); (13674 12732038 A G); (13675
12732064 C T); (13676 12732430 T C); (13677 12732451 T C); (13678 12732484 A C); (13679 12733477 A
G); (13680 12733852 T C); (13681 12733958 G A); (13682 12734016 C G); (13683 12734102 G A); (13684
12734153 G A); (13685 12734328 C T); (13686 12734509 T A); (13687 12734727 C T); (13688 12734836
G A); (13689 12735059 A G); (13690 12735439 T C); (13691 12735444 G A); (13692 12735587 A
G); (13693 12735787 T TGAGGGCTA); (13694 12735813 T G); (13695 12735874 C T); (13696 12736248 G
A); (13697 12736293 A G); (13698 12736388 G A); (13699 12736515 G A); (13700 12736536 A G); (13701
12736793 C T); (13702 12736987 A C); (13703 12737270 A G); (13704 12737303 T C); (13705 12737398
A C); (13706 12737548 T C); (13707 12737752 A G); (13708 12738063 G A); (13709 12738381 G
A); (13710 12738494 T C); (13711 12738689 G A); (13712 12738705 C A); (13713 12738849 C T); (13714
12739609 T C); (13715 12739812 C A); (13716 12739973 G C); (13717 12740507 T G); (13718 12740589
G A); (13719 12740894 T C); (13720 12741662 C A); (13721 12741909 C A); (13722 12742326 C
T); (13723 12742411 G A); (13724 12742488 G A); (13725 12742573 G A); (13726 12742622 C T); (13727
12749354 G GTT); (13728 12749824 G A); (13729 12752654 C T); (13730 12752739 A G); (13731
12752922 T C); (13732 12752945 T A); (13733 12753489 T TC); (13734 12769481 T A); (13735 12770025
T TC); (13736 12770364 G A); (13737 12772502 C T); (13738 12772610 A G); (13739 12772937 A
T); (13740 12773022 C T); (13741 12773159 A G); (13742 12773391 A G); (13743 12773452 C T); (13744
12773464 A C); (13745 12773515 T A); (13746 12773569 G C); (13747 12773612 C G); (13748 12773646
C T); (13749 12773665 C T); (13750 12774846 A G); (13751 12774992 T C); (13752 12775039 A
G); (13753 12775118 A C); (13754 12775256 C T); (13755 12776270 A G); (13756 12776457 C A); (13757
12776606 G A); (13758 12776682 C T); (13759 12776696 A T); (13760 12776945 G A); (13761 12776987
A G); (13762 12777059 G A); (13763 12777060 A G); (13764 12777068 G A); (13765 12777256 C
T); (13766 12777402 A G); (13767 12778233 A ATGCT); (13768 12778369 G A); (13769 12778394 G
A); (13770 12778462 C T); (13771 12778489 G T); (13772 12778732 C G); (13773 12778937 A C); (13774
12779130 G C); (13775 12779131 A G); (13776 12779157 C G); (13777 12779635 C T); (13778 12779751
A G); (13779 12779867 A C); (13780 12780197 A T); (13781 12780216 T G); (13782 12780244 T
C); (13783 12781083 G A); (13784 12781107 C T); (13785 12781115 G A); (13786 12781135 G A); (13787
12781195 G A); (13788 12781224 G A); (13789 12781226 A G); (13790 12781323 A G); (13791 12781346
C T); (13792 12781349 G A); (13793 12781452 T G); (13794 12781462 C T); (13795 12781590 C T); (13796
12781693 T A); (13797 12781818 T G); (13798 12782348 T G); (13799 12782488 G C); (13800 12782514
T C); (13801 12782780 A G); (13802 12782803 T C); (13803 12782914 A G); (13804 12782923 T
C); (13805 12783165 T C); (13806 12783830 G A); (13807 12783945 C T); (13808 12783984 T C); (13809
12784016 C T); (13810 12784459 T C); (13811 12784571 C T); (13812 12784772 G A); (13813 12785051 T
C); (13814 12785109 A G); (13815 12785810 C T); (13816 12786159 G A); (13817 12786557 A G); (13818
12786802 G C); (13819 12786804 G C); (13820 12786864 C G); (13821 12786971 C A); (13822 12787192
G C); (13823 12787417 A T); (13824 12787519 C T); (13825 12788384 T C); (13826 12788389 C T); (13827
12788767 G A); (13828 12789817 C T); (13829 12789977 T A); (13830 12790176 C G); (13831 12790436
T G); (13832 12790875 T C); (13833 12790886 C T); (13834 12790923 G A); (13835 12791059 T
G); (13836 12791082 T A); (13837 12791525 G C); (13838 12791650 A AT); (13839 12791902 G T); (13840
12792098 A C); (13841 12792529 T TA); (13842 12792613 T G); (13843 12792907 T C); (13844 12793039
T G); (13845 12793624 G A); (13846 12793846 G A); (13847 12793987 A G); (13848 12794140 G
A); (13849 12794360 T G); (13850 12795033 T C); (13851 12795098 C A); (13852 12795107 C T); (13853
12795750 C T); (13854 12796230 G C); (13855 12796293 C T); (13856 12796321 G A); (13857 12796344
C T); (13858 12796409 C CGCGCCATTA); (13859 12796626 C T); (13860 12796921 T A); (13861 12797050
G A); (13862 12797180 CA C); (13863 12797237 A G); (13864 12797340 T C); (13865 12797351 C
A); (13866 12797651 A G); (13867 12797912 T G); (13868 12798017 A G); (13869 12798069 T
TTA); (13870 12798556 A G); (13871 12798557 C T); (13872 12799043 A G); (13873 12799258 T
C); (13874 12799280 G T); (13875 12799414 T C); (13876 12799580 G A); (13877 12800174 A G); (13878
12800546 T C); (13879 12801291 T C); (13880 12801361 C T); (13881 12801375 C T); (13882 12801376 G
A); (13883 12801435 C T); (13884 12801441 T C); (13885 12801448 T C); (13886 12801537 G A); (13887
12801674 C T); (13888 12801702 G A); (13889 12801703 T C); (13890 12801734 T C); (13891 12802007
A T); (13892 12802030 A C); (13893 12802184 T C); (13894 12802275 G A); (13895 12802429 G
A); (13896 12802746 C T); (13897 12802785 A C); (13898 12802847 G T); (13899 12803020 G A); (13900
12803123 C G); (13901 12803124 A T); (13902 12803285 C T); (13903 12803366 C T); (13904 12803483
G A); (13905 12803532 G A); (13906 12803691 C T); (13907 12803826 G A); (13908 12803848 C
T); (13909 12804005 C T); (13910 12804067 T C); (13911 12804111 G A); (13912 12804473 C T); (13913
12804615 G T); (13914 12804798 T C); (13915 12805032 G A); (13916 12805126 G A); (13917 12805240
T C); (13918 12805430 T C); (13919 12806244 G GA); (13920 12807947 A G); (13921 12807979 G
A); (13922 12808833 G A); (13923 12809011 C T); (13924 12809024 G T); (13925 12811016 T C); (13926
12812026 T C); (13927 12812052 G A); (13928 12816163 G A); (13929 12818516 C A); (13930 12819540
T G); (13931 12819596 G A); (13932 12819685 C T); (13933 12822964 C T); (13934 12823061 G
A); (13935 12823432 A C); (13936 12823500 C T); (13937 12823726 G A); (13938 12823904 G T); (13939
12823922 C T); (13940 12824061 G T); (13941 12824080 G C); (13942 12824614 C T); (13943 12824709
G A); (13944 12824955 C G); (13945 12825006 C T); (13946 12825271 A G); (13947 12825288 T
C); (13948 12825316 G A); (13949 12825505 A G); (13950 12825584 G A); (13951 12825862 G A); (13952
12825962 A G); (13953 12825982 A G); (13954 12825993 C T); (13955 12826038 T C); (13956 12826208
G A); (13957 12826218 A C); (13958 12826271 T C); (13959 12826282 T C); (13960 12826361 A
G); (13961 12826512 T G); (13962 12826532 T A); (13963 12826748 A G); (13964 12827504 C A); (13965
12827548 TG T); (13966 12828379 T C); (13967 12828881 G A); (13968 12828981 A G); (13969
12828995 A G); (13970 12829131 C T); (13971 12829311 G A); (13972 12829378 T G); (13973 12829426
T C); (13974 12830087 G T); (13975 12830110 G T); (13976 12830488 G T); (13977 12830497 G
A); (13978 12830502 A G); (13979 12830516 A G); (13980 12830797 A G); (13981 12830854 T C); (13982
12830968 T C); (13983 12831018 A T); (13984 12831049 G A); (13985 12831088 G A); (13986 12831586
T G); (13987 12831784 T A); (13988 12832427 G T); (13989 12832925 C T); (13990 12833057 G
A); (13991 12833310 T A); (13992 12833343 A G); (13993 12833510 G A); (13994 12833551 C T); (13995
12833565 C G); (13996 12834025 A C); (13997 12834095 G A); (13998 12834099 T A); (13999 12834101
G A); (14000 12834309 G A); (14001 12835311 C G); (14002 12835446 T C); (14003 12835454 T
C); (14004 12835475 C T); (14005 12835514 C T); (14006 12835640 C T); (14007 12835871 T C); (14008
12835877 G T); (14009 12835900 A G); (14010 12836947 C T); (14011 12837982 A G); (14012 12837998
C T); (14013 12838007 T C); (14014 12838015 C A); (14015 12838032 A G); (14016 12838212 C T); (14017
12838268 A C); (14018 12838441 A T); (14019 12838458 G A); (14020 12838481 T C); (14021 12838602
A G); (14022 12838652 T A); (14023 12838691 T C); (14024 12838714 A T); (14025 12838816 C T); (14026
12839200 C A); (14027 12839209 G A); (14028 12839381 C T); (14029 12839384 T C); (14030 12839417
G A); (14031 12840415 T A); (14032 12840513 A G); (14033 12840704 A G); (14034 12840914 G
A); (14035 12840995 A G); (14036 12841014 A G); (14037 12841119 G A); (14038 12841264 C G); (14039
12841451 A C); (14040 12841937 A G); (14041 12842014 T C); (14042 12842121 A G); (14043 12842142
A G); (14044 12842199 A G); (14045 12842222 C T); (14046 12842472 T C); (14047 12842595 G
T); (14048 12842842 C T); (14049 12842857 G A); (14050 12842972 G A); (14051 12843291 G C); (14052
12843318 T C); (14053 12843710 T A); (14054 12843748 C T); (14055 12843904 A C); (14056 12843914 C
T); (14057 12844290 G T); (14058 12844856 G T); (14059 12844907 G A); (14060 12845172 C T); (14061
12845842 G A); (14062 12846015 T C); (14063 12846128 A C); (14064 12846206 G T); (14065 12846247
C T); (14066 12846265 T G); (14067 12846444 C G); (14068 12846582 G A); (14069 12846704 C
T); (14070 12846708 A AT); (14071 12846802 C T); (14072 12846875 G A); (14073 12846898 C T); (14074
12847087 A G); (14075 12848552 C G); (14076 12849416 C T); (14077 12852553 T C); (14078 12852752
G A); (14079 12853077 A C); (14080 12853135 C T); (14081 12853279 A G); (14082 12853932 G
A); (14083 12853935 C A); (14084 12854101 T C); (14085 12854563 G A); (14086 12854652 A G); (14087
12855261 C A); (14088 12855266 C T); (14089 12855280 C T); (14090 12855369 A C); (14091 12855931
G A); (14092 12855982 C T); (14093 12855987 A G); (14094 12856609 T A); (14095 12856626 G
A); (14096 12856826 C G); (14097 12856846 A G); (14098 12856862 T C); (14099 12857075 G A); (14100
12857650 T C); (14101 12857684 T C); (14102 12857964 C T); (14103 12858384 C T); (14104 12858386 C
T); (14105 12858563 T C); (14106 12858610 A G); (14107 12858816 A G); (14108 12858919 G A); (14109
12859105 T G); (14110 12859295 T C); (14111 12859332 A G); (14112 12859474 A C); (14113 12859824
A G); (14114 12860941 G A); (14115 12860999 A G); (14116 12861123 T G); (14117 12861416 A
T); (14118 12861667 T G); (14119 12862520 G C); (14120 12862527 C T); (14121 12862531 C T); (14122
12862579 T C); (14123 12862612 G T); (14124 12862967 T C); (14125 12862989 G A); (14126 12863238
A G); (14127 12864120 T C); (14128 12866835 C A); (14129 12866848 G A); (14130 12867202 G
A); (14131 12867248 A G); (14132 12867332 G A); (14133 12867784 A G); (14134 12867924 T C); (14135
12868592 C T); (14136 12868610 A C); (14137 12868673 T C); (14138 12869000 C T); (14139 12869209 C
A); (14140 12869433 T C); (14141 12869743 C G); (14142 12869807 T C); (14143 12869886 G A); (14144
12869942 A G); (14145 12870133 T G); (14146 12870402 A G); (14147 12870409 C T); (14148 12870738
G A); (14149 12870804 A C); (14150 12870960 A C); (14151 12871502 C T); (14152 12872062 G
A); (14153 12872227 T G); (14154 12872490 G A); (14155 12872614 G A); (14156 12872707 G A); (14157
12872789 C T); (14158 12873458 C T); (14159 12873507 A G); (14160 12873790 A G); (14161 12873860
T C); (14162 12874055 G A); (14163 12874136 A G); (14164 12874362 G A); (14165 12875193 AT
A); (14166 12875465 C G); (14167 12875686 G T); (14168 12875744 T A); (14169 12875836 A G); (14170
12876159 A T); (14171 12876248 A C); (14172 12876295 A C); (14173 12876319 C A); (14174 12876667
T C); (14175 12878004 A C); (14176 12878204 A G); (14177 12878637 A G); (14178 12879045 G
A); (14179 12879161 G A); (14180 12880482 T A); (14181 12880812 G A); (14182 12881064 T
TTG); (14183 12881800 A G); (14184 12881990 A AC); (14185 12881998 G A); (14186 12882327 C
T); (14187 12882942 C G); (14188 12883064 G C); (14189 12883105 G A); (14190 12883410 C T); (14191
12883592 A C); (14192 12883596 A G); (14193 12883663 T C); (14194 12884403 C T); (14195 12884446
A G); (14196 12884691 A G); (14197 12885040 A C); (14198 12885233 T G); (14199 12885374 C
T); (14200 12886825 C G); (14201 12886864 G T); (14202 12886956 A G); (14203 12887030 C T); (14204
12887291 C T); (14205 12887351 T C); (14206 12887414 G T); (14207 12887425 T G); (14208 12887526
G A); (14209 12887697 A C); (14210 12887756 C A); (14211 12888402 T C); (14212 12888964 C
T); (14213 12889071 G T); (14214 12889286 A ACC); (14215 12889594 G A); (14216 12889633 C
T); (14217 12889763 C T); (14218 12889771 C T); (14219 12889854 C T); (14220 12890137 C T); (14221
12890288 C T); (14222 12890515 A C); (14223 12890903 C T); (14224 12890992 A T); (14225 12891011 C
T); (14226 12891029 A C); (14227 12891328 T A); (14228 12891420 A G); (14229 12892008 C T); (14230
12892032 C T); (14231 12892042 T C); (14232 12892172 G A); (14233 12892491 T C); (14234 12892552 T
C); (14235 12892555 T C); (14236 12892675 G A); (14237 12892774 G A); (14238 12892800 T C); (14239
12892917 G A); (14240 12892955 C T); (14241 12892985 G A); (14242 12893084 C T); (14243 12893218
C G); (14244 12893264 A C); (14245 12893374 T C); (14246 12893637 G A); (14247 12893668 G
A); (14248 12893762 C T); (14249 12894142 A G); (14250 12894447 G A); (14251 12894484 A G); (14252
12894799 T C); (14253 12895138 T G); (14254 12895244 A G); (14255 12895274 C T); (14256 12895317
G A); (14257 12895603 A G); (14258 12895608 C T); (14259 12895613 T G); (14260 12895919 G
A); (14261 12896248 C T); (14262 12896638 C T); (14263 12896957 A G); (14264 12896959 A G); (14265
12897106 G A); (14266 12897455 G C); (14267 12897526 G A); (14268 12897667 G C); (14269 12898220
G A); (14270 12898294 C T); (14271 12898510 T C); (14272 12898570 G A); (14273 12898631 A
G); (14274 12898797 G A); (14275 12898984 C T); (14276 12899118 A T); (14277 12899140 C A); (14278
12899228 C T); (14279 12899275 T A); (14280 12899765 G A); (14281 12899884 A G); (14282 12899918
C T); (14283 12900011 G A); (14284 12900013 T C); (14285 12900079 T G); (14286 12900134 A
G); (14287 12900311 A G); (14288 12900391 A G); (14289 12900506 T G); (14290 12901027 T C); (14291
12901258 G T); (14292 12901368 T C); (14293 12901384 T C); (14294 12901519 G A); (14295 12902103
A G); (14296 12902283 C A); (14297 12902284 T C); (14298 12902345 G T); (14299 12902375 C
T); (14300 12902419 A G); (14301 12902551 C A); (14302 12902785 G A); (14303 12902850 G A); (14304
12902902 C A); (14305 12903247 C T); (14306 12903297 T C); (14307 12903559 G A); (14308 12904082
G A); (14309 12904206 C T); (14310 12904326 G A); (14311 12904641 G A); (14312 12904828 C
G); (14313 12904890 G A); (14314 12904894 G A); (14315 12904965 G A); (14316 12905231 G A); (14317
12905247 C T); (14318 12905410 T C); (14319 12905458 G A); (14320 12905535 G A); (14321 12905606
C T); (14322 12905769 G T); (14323 12906033 G A); (14324 12906043 C T); (14325 12906110 A
G); (14326 12906420 T C); (14327 12906442 A G); (14328 12906571 G A); (14329 12906695 A C); (14330
12906751 C T); (14331 12906767 G A); (14332 12906973 G C); (14333 12906995 T C); (14334 12907176
G A); (14335 12908320 A G); (14336 12908542 A G); (14337 12908652 A T); (14338 12908706 G
A); (14339 12908728 C T); (14340 12908821 T A); (14341 12908867 C T); (14342 12908999 C T); (14343
12909516 A G); (14344 12909602 T C); (14345 12909682 T C); (14346 12910039 G A); (14347 12910090
T C); (14348 12910127 T C); (14349 12910137 C T); (14350 12910698 G A); (14351 12910808 C T); (14352
12910824 C A); (14353 12911213 T A); (14354 12911954 C T); (14355 12912502 G A); (14356 12912875
G C); (14357 12912896 G A); (14358 12913064 T A); (14359 12913161 A G); (14360 12914969 T
C); (14361 12915008 T C); (14362 12915266 C T); (14363 12915643 A G); (14364 12915645 C T); (14365
12915801 C A); (14366 12915850 A G); (14367 12916593 C T); (14368 12917074 T C); (14369 12917285
A G); (14370 12917481 T C); (14371 12917502 T C); (14372 12917943 G A); (14373 12918088 A
C); (14374 12918586 T C); (14375 12921695 G A); (14376 12922601 A G); (14377 12924301 A G); (14378
12924315 T C); (14379 12924526 A G); (14380 12925240 T C); (14381 12925605 T C); (14382 12926054
G A); (14383 12926154 AT A); (14384 12926335 T G); (14385 12926694 T A); (14386 12926873 A
T); (14387 12927132 T C); (14388 12927177 A G); (14389 12927395 C T); (14390 12928612 C T); (14391
12929024 A G); (14392 12931371 A C); (14393 12931567 A G); (14394 12931708 C T); (14395 12931713
A C); (14396 12931808 G A); (14397 12931872 G A); (14398 12931895 C T); (14399 12932001 T
C); (14400 12932117 C T); (14401 12932171 C T); (14402 12932232 G A); (14403 12932387 G A); (14404
12932393 A G); (14405 12932443 C A); (14406 12932566 T C); (14407 12932778 C A); (14408 12932793
A G); (14409 12932875 C T); (14410 12932941 T C); (14411 12932995 T C); (14412 12933015 G
A); (14413 12933468 C T); (14414 12933573 C A); (14415 12933845 C T); (14416 12933917 C T); (14417
12933972 T C); (14418 12934043 T C); (14419 12934210 A G); (14420 12934575 T C); (14421 12935130
A G); (14422 12935156 G A); (14423 12935237 C T); (14424 12935335 T C); (14425 12935440 A
G); (14426 12936285 G C); (14427 12936312 T G); (14428 12936540 C T); (14429 12936928 A G); (14430
12937456 C A); (14431 12937471 T TTTTTCTCTATTTTTCTGGG); (14432 12937491 T C); (14433 12937498
T C); (14434 12937510 G A); (14435 12937523 G A); (14436 12937563 T G); (14437 12937634 G
A); (14438 12937892 T TGTAGAAGTAGGA); (14439 12937966 C T); (14440 12937988 G A); (14441
12938006 G C); (14442 12938099 G A); (14443 12939064 G A); (14444 12939158 G A); (14445 12939178
G A); (14446 12939242 G A); (14447 12940715 C T); (14448 12940882 T C); (14449 12940915 A
T); (14450 12941112 A G); (14451 12942787 G A); (14452 12943594 T C); (14453 12943851 C G); (14454
12944219 A G); (14455 12944353 A G); (14456 12944538 T C); (14457 12944734 T C); (14458 12945054
C A); (14459 12945269 A C); (14460 12945284 G A); (14461 12945315 G T); (14462 12945493 C
A); (14463 12946208 C A); (14464 12947318 C T); (14465 12947352 A T); (14466 12947476 C T); (14467
12947477 A G); (14468 12947597 T TATTAGCTTGTAATGA); (14469 12948026 C A); (14470 12948177 C
T); (14471 12948280 C T); (14472 12948302 T C); (14473 12948427 T C); (14474 12948673 T G); (14475
12948824 C T); (14476 12948963 A G); (14477 12949163 C A); (14478 12949265 A T); (14479 12951862
A G); (14480 12951888 G A); (14481 12953359 A T); (14482 12953493 T C); (14483 12953620 G
A); (14484 12953812 CT C); (14485 12953974 A G); (14486 12954090 C T); (14487 12954207 A C); (14488
12954255 T A); (14489 12954382 G A); (14490 12955087 T C); (14491 12955460 G A); (14492 12955498
G A); (14493 12955696 C A); (14494 12955954 A G); (14495 12956042 A AT); (14496 12956060 T
G); (14497 12956479 A G); (14498 12956486 G T); (14499 12957115 C T); (14500 12957489 T G); (14501
12957793 C T); (14502 12957931 T C); (14503 12958460 C T); (14504 12958957 A G); (14505 12958965 C
T); (14506 12959664 T A); (14507 12959679 A G); (14508 12959691 T C); (14509 12959717 T C); (14510
12959724 A G); (14511 12959736 G A); (14512 12959788 T A); (14513 12959822 A G); (14514 12959844
T C); (14515 12962842 A G); (14516 12963405 T C); (14517 12963512 G A); (14518 12963774 C
G); (14519 12963894 A G); (14520 12964549 G A); (14521 12965058 G T); (14522 12965139 T C); (14523
12965239 G A); (14524 12965336 A ATGATGT); (14525 12965454 C A); (14526 12965501 T A); (14527
12965514 A T); (14528 12965820 T C); (14529 12965843 G A); (14530 12965938 G A); (14531 12966029
C A); (14532 12966032 A C); (14533 12966284 G T); (14534 12966663 G A); (14535 12966771 C
T); (14536 12967349 G A); (14537 12967646 G T); (14538 12968784 A C); (14539 12982696 T A); (14540
12982698 A T); (14541 12982766 CT C); (14542 12983791 C CCAA); (14543 12984111 A G); (14544
12984921 G A); (14545 12985761 G A); (14546 12986918 T A); (14547 12986919 T A); (14548 12987071
A C); (14549 12987109 AG A); (14550 12987208 G GA); (14551 12987350 A G); (14552 12987974 A
C); (14553 12987981 T C); (14554 12988804 T C); (14555 12988825 C T); (14556 12989168 G T); (14557
12989183 T A); (14558 12989468 C T); (14559 12989617 A C); (14560 12990417 C T); (14561 12990443 C
T); (14562 12990791 T C); (14563 12990974 T C); (14564 12991006 T C); (14565 12991015 C A); (14566
12991037 A G); (14567 12991112 A G); (14568 12991186 A C); (14569 12991203 A C); (14570 12991277
C T); (14571 12991354 A G); (14572 12991382 G A); (14573 12991540 T C); (14574 12991600 T
C); (14575 12991746 G A); (14576 12991835 C T); (14577 12992134 G A); (14578 12992142 G A); (14579
12992307 G C); (14580 12992778 G T); (14581 12992812 T C); (14582 12992854 G A); (14583 12993118
T C); (14584 12993205 C T); (14585 12993418 A G); (14586 12993880 G T); (14587 12993918 G
A); (14588 12993997 T C); (14589 12994150 C T); (14590 12994240 A G); (14591 12994353 G T); (14592
12994677 G A); (14593 12995160 C T); (14594 12995429 G A); (14595 12995543 T C); (14596 12995840
T C); (14597 12995940 A G); (14598 12996508 C T); (14599 12996948 A C); (14600 13002024 A
C); (14601 13002456 G A); (14602 13003746 G A); (14603 13003849 G A); (14604 13003878 C T); (14605
13004120 C G); (14606 13004187 G A); (14607 13004260 T C); (14608 13004859 C G); (14609 13004967
C T); (14610 13005147 G A); (14611 13005300 G A); (14612 13005303 T C); (14613 13005304 A
T); (14614 13005333 C T); (14615 13005379 C A); (14616 13005526 A C); (14617 13005996 T C); (14618
13006121 T G); (14619 13006295 C T); (14620 13006312 G A); (14621 13006385 T C); (14622 13006475
C T); (14623 13006480 G A); (14624 13006673 C T); (14625 13006811 A G); (14626 13006841 C
G); (14627 13007376 G A); (14628 13007458 T C); (14629 13007753 C T); (14630 13008497 C T); (14631
13008520 A AAAACAGAC); (14632 13008551 C T); (14633 13008576 C T); (14634 13008842 A T); (14635
13008956 G A); (14636 13009334 G C); (14637 13009521 C A); (14638 13009534 G A); (14639 13009797
A G); (14640 13009865 G A); (14641 13010076 G A); (14642 13010109 C T); (14643 13010131 C
T); (14644 13010630 G C); (14645 13010786 C A); (14646 13010788 T C); (14647 13011024 C T); (14648
13011086 A G); (14649 13011213 C T); (14650 13011242 C T); (14651 13011291 C T); (14652 13011375
G A); (14653 13011596 G A); (14654 13011654 G A); (14655 13011781 G A); (14656 13011799 C
T); (14657 13011867 A G); (14658 13012237 C T); (14659 13012308 C T); (14660 13012436 A C); (14661
13012492 G A); (14662 13012659 T C); (14663 13012706 T C); (14664 13012776 T C); (14665 13012971 C
T); (14666 13013381 C T); (14667 13013415 C G); (14668 13013419 A G); (14669 13013490 C T); (14670
13013496 C G); (14671 13013646 A G); (14672 13013720 T A); (14673 13013753 G T); (14674 13013904
C T); (14675 13014035 A G); (14676 13014373 G T); (14677 13014395 G A); (14678 13014404 T
C); (14679 13014633 C T); (14680 13014640 C T); (14681 13014700 C T); (14682 13014755 A G); (14683
13014815 T C); (14684 13015325 A C); (14685 13015601 C T); (14686 13016142 A G); (14687 13016304
C G); (14688 13016526 C T); (14689 13016635 A G); (14690 13016772 T C); (14691 13016953 C
G); (14692 13017319 TATA T); (14693 13017404 A T); (14694 13017419 A T); (14695 13017745 C
T); (14696 13017791 G A); (14697 13017823 A G); (14698 13017898 T C); (14699 13018040 T G); (14700
13018254 A T); (14701 13018255 A T); (14702 13018574 G A); (14703 13019013 A T); (14704 13019304
G GA); (14705 13019470 T TA); (14706 13020269 A G); (14707 13020411 G T); (14708 13020926 T
TACCCCCC); (14709 13021077 TA T); (14710 13021206 C G); (14711 13021559 C A); (14712 13021560 A
T); (14713 13022402 T A); (14714 13022505 C T); (14715 13023042 CAAGATCTA C); (14716 13023139 G
A); (14717 13023166 T G); (14718 13024091 A G); (14719 13024093 T G); (14720 13024100 G A); (14721
13024422 T C); (14722 13024537 GGGGCC G); (14723 13024694 A G); (14724 13024708 T G); (14725
13024918 G A); (14726 13025074 G A); (14727 13025151 T C); (14728 13025364 G A); (14729 13025710
G T); (14730 13025916 G A); (14731 13026129 A T); (14732 13026264 C T); (14733 13026931 T C); (14734
13027404 A C); (14735 13030176 TA T); (14736 13032138 GA G); (14737 13032211 T A); (14738
13032348 C A); (14739 13035078 T G); (14740 13035094 T C); (14741 13035150 T G); (14742 13036599
A T); (14743 13036798 T C); (14744 13036880 C T); (14745 13036906 G A); (14746 13037027 C A); (14747
13037896 T C); (14748 13038213 G T); (14749 13038290 C G); (14750 13038421 A G); (14751 13038612
A G); (14752 13038727 A G); (14753 13039138 T C); (14754 13039220 A G); (14755 13039301 G
A); (14756 13039592 C T); (14757 13039997 C A); (14758 13040003 G A); (14759 13040042 A C); (14760
13040192 C G); (14761 13040214 T C); (14762 13040534 G A); (14763 13041062 T C); (14764 13041175
C T); (14765 13041207 A G); (14766 13041240 T C); (14767 13041704 A G); (14768 13041946 T
C); (14769 13042176 A G); (14770 13042278 A G); (14771 13042483 A G); (14772 13043007 A C); (14773
13043099 C T); (14774 13043156 A G); (14775 13043387 G A); (14776 13043566 C A); (14777 13043814
T C); (14778 13043942 T A); (14779 13044372 G C); (14780 13044526 T C); (14781 13044815 GT
G); (14782 13045265 G A); (14783 13045394 T G); (14784 13045436 G A); (14785 13045696 G A); (14786
13046512 T C); (14787 13046571 T C); (14788 13046678 A G); (14789 13046689 A G); (14790 13047170
G A); (14791 13047782 G A); (14792 13047870 C G); (14793 13048054 A C); (14794 13048186 A
G); (14795 13048699 T C); (14796 13048870 A G); (14797 13048872 C T); (14798 13048973 C T); (14799
13049018 G A); (14800 13049175 A G); (14801 13049423 G A); (14802 13049565 C A); (14803 13049656
A G); (14804 13052496 A G); (14805 13064874 C T); (14806 13064908 A T); (14807 13064936 T
C); (14808 13064942 T C); (14809 13064950 G T); (14810 13064976 C A); (14811 13065328 T C); (14812
13065386 A G); (14813 13065676 T A); (14814 13068041 C T); (14815 13068113 C T); (14816 13068357
A G); (14817 13068439 C T); (14818 13068514 G A); (14819 13068557 C A); (14820 13068576 C
T); (14821 13068670 A G); (14822 13068908 A G); (14823 13068911 T C); (14824 13069464 A G); (14825
13069924 G A); (14826 13070098 T C); (14827 13070504 G A); (14828 13070696 A G); (14829 13070724
A C); (14830 13070958 A G); (14831 13070959 C T); (14832 13071144 A G); (14833 13071384 C
CAT); (14834 13071401 G A); (14835 13071417 G A); (14836 13072294 T C); (14837 13073483 C
T); (14838 13074172 A G); (14839 13074310 C T); (14840 13074822 A G); (14841 13076056 G A); (14842
13076858 G A); (14843 13076924 A G); (14844 13076977 A G); (14845 13077152 G T); (14846 13077174
C T); (14847 13077601 G A); (14848 13077610 G A); (14849 13077718 T TTGAACAATATGACAA); (14850
13077766 A G); (14851 13078348 T TAGTTAAAA); (14852 13078537 A AC); (14853 13078723 A
T); (14854 13078725 T A); (14855 13079277 A G); (14856 13079394 A G); (14857 13079413 C T); (14858
13079417 A G); (14859 13080578 C T); (14860 13080788 C T); (14861 13080808 G A); (14862 13080829
C T); (14863 13081032 C T); (14864 13081309 C T); (14865 13081389 A G); (14866 13081416 G
A); (14867 13081473 T C); (14868 13081826 T A); (14869 13082052 C T); (14870 13082100 A G); (14871
13082281 G A); (14872 13083037 C T); (14873 13083161 A T); (14874 13083162 A T); (14875 13083466
AC A); (14876 13083524 C T); (14877 13084341 A C); (14878 13084377 C T); (14879 13084409 C
T); (14880 13084528 G GT); (14881 13084695 C T); (14882 13084962 C G); (14883 13085009 G A); (14884
13085307 C T); (14885 13085543 A G); (14886 13085544 G A); (14887 13085788 T C); (14888 13085892
G A); (14889 13086372 A T); (14890 13086678 A G); (14891 13086739 G A); (14892 13086746 A
G); (14893 13086747 A G); (14894 13086811 C T); (14895 13086924 C T); (14896 13086945 G A); (14897
13087037 A C); (14898 13087063 G T); (14899 13087626 A C); (14900 13087988 G A); (14901 13088163
T G); (14902 13088491 A T); (14903 13089056 C CT); (14904 13089531 T A); (14905 13089986 G
A); (14906 13090190 G C); (14907 13090306 C T); (14908 13090525 T G); (14909 13091003 A G); (14910
13091101 G A); (14911 13091197 A G); (14912 13091566 C A); (14913 13092018 G A); (14914 13092945
A AT); (14915 13093355 T C); (14916 13093413 G A); (14917 13093631 G A); (14918 13093670 C
T); (14919 13093677 T G); (14920 13093724 C T); (14921 13093765 A G); (14922 13094742 T C); (14923
13094801 C T); (14924 13094834 G A); (14925 13094871 C T); (14926 13094908 A G); (14927 13094915
C A); (14928 13095057 A G); (14929 13095061 T C); (14930 13095460 A T); (14931 13096096 A
G); (14932 13096130 C T); (14933 13096477 A G); (14934 13096780 T A); (14935 13096786 G A); (14936
13098969 C T); (14937 13099008 C T); (14938 13099056 C T); (14939 13099170 G A); (14940 13100328 C
T); (14941 13101200 G A); (14942 13101206 G A); (14943 13101207 A G); (14944 13103113 A G); (14945
13103120 T G); (14946 13104920 A G); (14947 13105148 G A); (14948 13105383 G A); (14949 13105427
A G); (14950 13105462 G T); (14951 13106299 G A); (14952 13106331 C T); (14953 13106419 C
T); (14954 13106449 T C); (14955 13106700 A G); (14956 13106765 G A); (14957 13106784 G T); (14958
13106899 C T); (14959 13106912 G A); (14960 13107003 A G); (14961 13107090 G A); (14962 13107264
G A); (14963 13107282 A AG); (14964 13107717 T C); (14965 13107825 C A); (14966 13107961 T
G); (14967 13108227 G A); (14968 13108508 G A); (14969 13108793 C T); (14970 13108860 TA T); (14971
13108895 A G); (14972 13108959 G C); (14973 13109225 G C); (14974 13109327 C A); (14975 13109376
T G); (14976 13109500 C A); (14977 13109597 A G); (14978 13109640 G T); (14979 13110010 T
A); (14980 13110438 C T); (14981 13110553 C T); (14982 13110570 C T); (14983 13110838 C G); (14984
13110962 A G); (14985 13111156 C T); (14986 13111200 T TG); (14987 13111454 A G); (14988
13111510 T C); (14989 13111830 C T); (14990 13111985 A G); (14991 13112236 T G); (14992 13112874
T C); (14993 13113416 A G); (14994 13113572 C T); (14995 13114741 G A); (14996 13115165 A
G); (14997 13115230 G T); (14998 13115321 T C); (14999 13115496 G A); (15000 13115966 G A); (15001
13116274 A G); (15002 13116988 G A); (15003 13117081 A G); (15004 13117085 G A); (15005 13117381
T C); (15006 13117498 TG T); (15007 13117605 A G); (15008 13117732 C T); (15009 13117846 C
T); (15010 13117874 A G); (15011 13117878 T C); (15012 13117957 C T); (15013 13117960 A G); (15014
13118018 G A); (15015 13118055 G A); (15016 13118118 T C); (15017 13118131 A G); (15018 13119248
G A); (15019 13119915 C T); (15020 13119923 A G); (15021 13120335 A G); (15022 13120635 T
A); (15023 13120680 A G); (15024 13121130 A G); (15025 13121193 A G); (15026 13121340 A G); (15027
13121461 T C); (15028 13121834 G A); (15029 13122235 T C); (15030 13122674 T C); (15031 13122797
G A); (15032 13123492 G A); (15033 13123502 G A); (15034 13123529 T C); (15035 13123681 A
G); (15036 13124006 G A); (15037 13124314 C T); (15038 13124318 G A); (15039 13124503 C T); (15040
13124877 G A); (15041 13124924 G A); (15042 13124954 T C); (15043 13125154 C T); (15044 13125364
A G); (15045 13125881 G T); (15046 13125921 A G); (15047 13126229 T C); (15048 13126618 G
A); (15049 13126863 GC G); (15050 13126902 T C); (15051 13126931 G A); (15052 13127083 G
C); (15053 13127903 G T); (15054 13127976 A C); (15055 13128562 C A); (15056 13131558 A G); (15057
13135190 G A); (15058 13135262 T C); (15059 13135446 C T); (15060 13135572 C A); (15061 13135792
A G); (15062 13135832 A G); (15063 13135861 T C); (15064 13135935 T C); (15065 13136090 T
G); (15066 13136108 T C); (15067 13136117 C T); (15068 13136247 C T); (15069 13136485 G A); (15070
13136500 G A); (15071 13136527 T C); (15072 13136827 C A); (15073 13136984 G C); (15074 13137014
C T); (15075 13137128 A G); (15076 13137151 C T); (15077 13137174 T C); (15078 13137233 G T); (15079
13137295 C T); (15080 13137392 G C); (15081 13137614 A G); (15082 13137885 A T); (15083 13138043
A T); (15084 13138103 G C); (15085 13138121 C T); (15086 13138135 T C); (15087 13138158 C T); (15088
13138479 G A); (15089 13138571 G A); (15090 13138784 A G); (15091 13139227 C T); (15092 13139414
C T); (15093 13139466 G T); (15094 13139559 C T); (15095 13140307 C T); (15096 13141849 T
TAA); (15097 13142011 T C); (15098 13142348 T C); (15099 13142405 T C); (15100 13142901 A
AATT); (15101 13143514 C CATGATT); (15102 13143697 T A); (15103 13144145 A G); (15104 13144154 A
C); (15105 13144371 C T); (15106 13144426 C T); (15107 13144700 T G); (15108 13145509 C G); (15109
13145878 C T); (15110 13145977 A C); (15111 13146086 G A); (15112 13146163 T C); (15113 13146164
T C); (15114 13146417 G C); (15115 13146614 G A); (15116 13146672 T C); (15117 13148133 A
G); (15118 13149580 C T); (15119 13149869 C T); (15120 13150006 T C); (15121 13150066 T C); (15122
13150089 G T); (15123 13150401 T C); (15124 13150462 G A); (15125 13150514 G A); (15126 13150531
C A); (15127 13150575 T C); (15128 13150739 G T); (15129 13150835 A G); (15130 13150891 T
C); (15131 13150906 T A); (15132 13150957 T C); (15133 13151001 G A); (15134 13151191 A G); (15135
13151289 G GA); (15136 13151945 T C); (15137 13151969 G T); (15138 13152029 C G); (15139
13152081 G C); (15140 13153116 A AT); (15141 13153754 T C); (15142 13153931 G T); (15143 13154181
T C); (15144 13154634 G A); (15145 13154898 C A); (15146 13155558 C T); (15147 13156470 C T); (15148
13156514 G A); (15149 13157415 A C); (15150 13157427 C A); (15151 13157447 T C); (15152 13157500
A G); (15153 13157671 C T); (15154 13158950 T G); (15155 13159430 G T); (15156 13159784 G
A); (15157 13160369 T A); (15158 13160377 G A); (15159 13160519 G C); (15160 13160534 C T); (15161
13160553 T G); (15162 13160719 G GA); (15163 13161110 C A); (15164 13161157 A C); (15165
13161442 A G); (15166 13162163 T G); (15167 13162202 A G); (15168 13162371 C T); (15169 13162515
T C); (15170 13162779 GT G); (15171 13162887 T A); (15172 13162963 G C); (15173 13163209 G
A); (15174 13163213 CTG C); (15175 13163379 A T); (15176 13163400 C G); (15177 13163402 T
C); (15178 13163410 T C); (15179 13163560 G A); (15180 13163564 A G); (15181 13163691 C T); (15182
13163967 A T); (15183 13163974 C T); (15184 13164376 C T); (15185 13164563 G A); (15186 13164946 T
C); (15187 13165151 T C); (15188 13165252 A G); (15189 13165376 C T); (15190 13165685 G A); (15191
13166070 AT A); (15192 13166343 C G); (15193 13166394 A C); (15194 13166795 A G); (15195
13167055 CT C); (15196 13167244 G A); (15197 13167258 A G); (15198 13167268 C T); (15199 13167317
T A); (15200 13167597 A AT); (15201 13167807 C T); (15202 13167836 G A); (15203 13167975 G
T); (15204 13168375 A C); (15205 13168656 G A); (15206 13169170 C T); (15207 13169497 C G); (15208
13169509 T C); (15209 13169920 G T); (15210 13170076 A G); (15211 13170330 C G); (15212 13170437
A C); (15213 13170531 C A); (15214 13170859 C T); (15215 13171212 T C); (15216 13171445 C G); (15217
13171677 G T); (15218 13171847 A AT); (15219 13172843 T C); (15220 13172884 G T); (15221 13173255
A T); (15222 13173704 T C); (15223 13174471 G C); (15224 13174477 A T); (15225 13174769 C T); (15226
13175076 C A); (15227 13175547 TA T); (15228 13175738 G T); (15229 13175752 T A); (15230 13176106
G T); (15231 13176422 A G); (15232 13176450 G A); (15233 13177672 T C); (15234 13179029 T
G); (15235 13179148 G A); (15236 13179170 A C); (15237 13179254 C T); (15238 13179453 C G); (15239
13179474 T C); (15240 13179489 T G); (15241 13179595 C T); (15242 13179747 C T); (15243 13179779 T
C); (15244 13180106 C G); (15245 13180345 G A); (15246 13180460 C T); (15247 13180707 G A); (15248
13181487 A C); (15249 13181543 C T); (15250 13181623 A G); (15251 13181718 A G); (15252 13182264
C T); (15253 13182317 G A); (15254 13182521 T C); (15255 13182812 T C); (15256 13182983 G
A); (15257 13183063 T C); (15258 13183118 AG A); (15259 13183612 G A); (15260 13183892 C
A); (15261 13184248 A G); (15262 13184463 T TA); (15263 13185466 T C); (15264 13185609 C T); (15265
13185767 A G); (15266 13185799 A G); (15267 13185848 C T); (15268 13185918 T C); (15269 13186071
C T); (15270 13186438 C T); (15271 13186610 A G); (15272 13187586 A C); (15273 13187821 A
G); (15274 13188180 A C); (15275 13188291 T A); (15276 13188432 T C); (15277 13190135 G T); (15278
13190387 C T); (15279 13192217 C T); (15280 13193647 C T); (15281 13194288 C T); (15282 13196213 G
A); (15283 13196675 A C); (15284 13198101 C T); (15285 13198162 T A); (15286 13198271 G A); (15287
13198358 G A); (15288 13199289 G A); (15289 13199349 C T); (15290 13199487 G A); (15291 13199541
G T); (15292 13199564 G A); (15293 13199700 T C); (15294 13199802 C T); (15295 13199892 A
G); (15296 13199936 C T); (15297 13199943 A C); (15298 13200026 C T); (15299 13203031 C T); (15300
13203905 A G); (15301 13203983 T TTC); (15302 13203986 T C); (15303 13204069 AG A); (15304
13204101 C T); (15305 13204274 T C); (15306 13204966 G A); (15307 13205116 G C); (15308 13205608
C T); (15309 13205727 C T); (15310 13205942 G A); (15311 13206060 CATTAT C); (15312 13206122 A
G); (15313 13206309 T C); (15314 13206624 T C); (15315 13207289 A C); (15316 13207369 T C); (15317
13207665 A G); (15318 13208346 G A); (15319 13208408 A G); (15320 13208409 A G); (15321 13208641
T C); (15322 13209045 A G); (15323 13209173 C A); (15324 13209559 G A); (15325 13209612 G
A); (15326 13209725 G A); (15327 13210088 C T); (15328 13210102 C G); (15329 13210106 A T); (15330
13210142 A G); (15331 13210375 A G); (15332 13211722 G A); (15333 13211939 T G); (15334 13211994
G A); (15335 13212039 G C); (15336 13212123 T C); (15337 13212167 T G); (15338 13212309 G
A); (15339 13212322 G A); (15340 13212434 T G); (15341 13212603 G A); (15342 13212789 C T); (15343
13212885 A C); (15344 13212901 G A); (15345 13212913 T G); (15346 13213087 T C); (15347 13214495
G A); (15348 13214614 T C); (15349 13214660 G A); (15350 13214984 G A); (15351 13215772 G
A); (15352 13215840 G T); (15353 13216062 TGAGG T); (15354 13216087 A T); (15355 13216088 G
A); (15356 13216100 A G); (15357 13216232 C A); (15358 13216844 C T); (15359 13217393 C T); (15360
13217405 T A); (15361 13217655 A T); (15362 13217733 A G); (15363 13217835 A G); (15364 13217847
T C); (15365 13217865 C T); (15366 13217926 T C); (15367 13218287 T G); (15368 13218377 C A); (15369
13218439 G A); (15370 13218593 G C); (15371 13218625 A T); (15372 13218632 A G); (15373 13218763
T C); (15374 13218768 C G); (15375 13218948 C T); (15376 13219361 T G); (15377 13219381 T C); (15378
13219787 T G); (15379 13219925 G A); (15380 13220032 T C); (15381 13220041 A G); (15382 13220658
A G); (15383 13221364 G C); (15384 13221473 G A); (15385 13221642 C T); (15386 13221732 C
T); (15387 13222183 C T); (15388 13222202 G A); (15389 13222771 A G); (15390 13223115 A G); (15391
13223186 C T); (15392 13223276 A G); (15393 13223341 C A); (15394 13223437 C T); (15395 13223669
T C); (15396 13223776 A G); (15397 13223837 G A); (15398 13224272 A G); (15399 13224324 G
A); (15400 13224359 G A); (15401 13224434 G A); (15402 13224455 T C); (15403 13224527 C G); (15404
13224557 G A); (15405 13224636 T C); (15406 13224754 T C); (15407 13225024 T C); (15408 13225108 C
A); (15409 13225118 T C); (15410 13225212 T C); (15411 13225288 C T); (15412 13225368 T C); (15413
13225746 C G); (15414 13225981 A G); (15415 13226129 C T); (15416 13226273 T G); (15417 13226366
G A); (15418 13226440 T C); (15419 13226720 CT C); (15420 13226813 G A); (15421 13226896 A
G); (15422 13227035 A G); (15423 13227480 C T); (15424 13227717 G A); (15425 13228350 G T); (15426
13228443 A G); (15427 13228463 T G); (15428 13228466 A G); (15429 13228494 G A); (15430 13228501
G A); (15431 13228636 A G); (15432 13228686 T A); (15433 13229475 A C); (15434 13229928 G
A); (15435 13229938 C T); (15436 13229986 A T); (15437 13230776 T C); (15438 13230784 T C); (15439
13231130 C T); (15440 13231574 A G); (15441 13231598 C T); (15442 13231756 C G); (15443 13231847
A G); (15444 13232001 T C); (15445 13232394 T C); (15446 13232736 G T); (15447 13232763 G
A); (15448 13232784 C G); (15449 13233139 C T); (15450 13233372 C T); (15451 13233556 A C); (15452
13234379 G A); (15453 13234565 T C); (15454 13234810 T C); (15455 13234824 G A); (15456 13235058
C T); (15457 13235154 G A); (15458 13235372 C T); (15459 13235952 C T); (15460 13236410 A
G); (15461 13236555 T G); (15462 13236643 G A); (15463 13236681 A G); (15464 13236737 G A); (15465
13236979 G A); (15466 13238544 G A); (15467 13238640 C T); (15468 13238708 A G); (15469 13238797
AAAGT A); (15470 13239102 T C); (15471 13239105 C T); (15472 13239644 A G); (15473 13239777 C
T); (15474 13240302 T G); (15475 13240716 A G); (15476 13241293 A G); (15477 13242270 TTG
T); (15478 13242727 C T); (15479 13242938 GA G); (15480 13243272 T C); (15481 13243403 G A); (15482
13243712 G A); (15483 13243887 A G); (15484 13244108 C T); (15485 13244268 C T); (15486 13244395
G C); (15487 13244526 TA T); (15488 13244559 C T); (15489 13244596 G A); (15490 13244648 A
G); (15491 13244947 A G); (15492 13244958 C T); (15493 13245119 A G); (15494 13245135 G A); (15495
13245194 T G); (15496 13245251 G C); (15497 13246049 A G); (15498 13246121 TG T); (15499
13246467 A G); (15500 13247559 A G); (15501 13247588 G A); (15502 13248005 C T); (15503 13248161
C T); (15504 13248346 G A); (15505 13248657 G A); (15506 13248900 A C); (15507 13249664 C
T); (15508 13249728 G A); (15509 13249914 G A); (15510 13250015 C T); (15511 13250027 C T); (15512
13250823 A G); (15513 13250839 C T); (15514 13251164 T C); (15515 13251364 T C); (15516 13251390 T
C); (15517 13251523 G T); (15518 13251814 A G); (15519 13251880 T C); (15520 13251919 T C); (15521
13252760 A C); (15522 13252811 A G); (15523 13252860 A G); (15524 13252935 G C); (15525 13253158
T C); (15526 13253295 G A); (15527 13253441 T C); (15528 13253771 A G); (15529 13253797 G
T); (15530 13253798 T A); (15531 13254054 T C); (15532 13254287 G A); (15533 13255146 T G); (15534
13255177 G A); (15535 13255607 T C); (15536 13255787 G A); (15537 13256182 T C); (15538 13256498
A C); (15539 13257176 C A); (15540 13257373 C A); (15541 13257597 A G); (15542 13257905 G
A); (15543 13258071 C T); (15544 13258140 C T); (15545 13258669 T C); (15546 13258782 T C); (15547
13258826 GT G); (15548 13259026 C T); (15549 13259435 T C); (15550 13259825 C G); (15551 13259965
A T); (15552 13260049 C A); (15553 13260775 GT G); (15554 13260874 C T); (15555 13261213 T
TATGTGGCAGATGCAAGTG); (15556 13261424 A G); (15557 13261686 G A); (15558 13261917 A
G); (15559 13261988 A T); (15560 13262217 C T); (15561 13262454 G T); (15562 13263517 C T); (15563
13264078 T A); (15564 13264403 C A); (15565 13264519 A G); (15566 13264791 A G); (15567 13264834
TC T); (15568 13265174 A C); (15569 13265823 C T); (15570 13266134 A G); (15571 13266160 CT
C); (15572 13266275 G T); (15573 13266732 A G); (15574 13266963 C T); (15575 13266974 C T); (15576
13267138 T A); (15577 13267216 A G); (15578 13267236 C T); (15579 13267460 G A); (15580 13267616
T C); (15581 13268093 T C); (15582 13268121 A G); (15583 13268188 G T); (15584 13268346 T
G); (15585 13268410 T TGA); (15586 13268536 C A); (15587 13269033 G T); (15588 13269083 C
A); (15589 13270208 A G); (15590 13270483 C T); (15591 13270606 G A); (15592 13270635 C T); (15593
13270678 G A); (15594 13271229 C T); (15595 13271416 A G); (15596 13271449 A T); (15597 13271946
T TA); (15598 13272075 A C); (15599 13272191 G T); (15600 13272227 T C); (15601 13272381 T
C); (15602 13272529 G A); (15603 13272846 C G); (15604 13273175 A G); (15605 13273346 A T); (15606
13273371 T C); (15607 13273403 C T); (15608 13273710 C A); (15609 13273812 G C); (15610 13273871 T
C); (15611 13274036 C G); (15612 13274292 A T); (15613 13274300 T C); (15614 13274366 A G); (15615
13274414 G A); (15616 13274486 T C); (15617 13274529 G A); (15618 13274632 T C); (15619 13274648
T C); (15620 13274845 G T); (15621 13274962 T C); (15622 13275060 G A); (15623 13275062 A
G); (15624 13275391 A G); (15625 13275615 A C); (15626 13276011 C CA); (15627 13276175 T C); (15628
13276650 C T); (15629 13277508 T A); (15630 13277509 A C); (15631 13277549 C T); (15632 13277578
G A); (15633 13278278 G A); (15634 13278518 T C); (15635 13278641 C CT); (15636 13278837 T
C); (15637 13278860 C T); (15638 13279245 C A); (15639 13279318 C T); (15640 13280072 C T); (15641
13280677 A T); (15642 13280730 T A); (15643 13280732 C T); (15644 13280735 C T); (15645 13281014 T
C); (15646 13281056 C T); (15647 13281396 T C); (15648 13281465 C G); (15649 13281547 A G); (15650
13281597 G C); (15651 13281647 G A); (15652 13281707 C T); (15653 13281950 G A); (15654 13282019
T C); (15655 13282142 G T); (15656 13282188 A G); (15657 13282332 C A); (15658 13282502 A
C); (15659 13283454 T C); (15660 13284609 A ACCTAAAACTAG); (15661 13284868 T C); (15662
13284870 C T); (15663 13284879 C A); (15664 13284892 G A); (15665 13284899 G A); (15666 13285074
C T); (15667 13285211 C T); (15668 13285261 T C); (15669 13285275 C T); (15670 13285488 C G); (15671
13285526 G A); (15672 13285752 C T); (15673 13285763 A C); (15674 13285787 G A); (15675 13285825
G A); (15676 13285855 T C); (15677 13286097 G A); (15678 13286557 GA AG); (15679 13287698 C
T); (15680 13287705 G A); (15681 13287826 G A); (15682 13287866 G A); (15683 13288694 C A); (15684
13288784 A G); (15685 13289090 T G); (15686 13289095 G C); (15687 13289636 A G); (15688 13290091
T A); (15689 13290131 C G); (15690 13290301 C T); (15691 13290553 A AT); (15692 13290682 A
G); (15693 13291106 G A); (15694 13291123 G C); (15695 13291841 T C); (15696 13292471 G A); (15697
13292503 A G); (15698 13292521 G A); (15699 13292753 T C); (15700 13292843 A C); (15701 13292891
C T); (15702 13292916 T TA); (15703 13293197 C A); (15704 13293200 C T); (15705 13293327 C
T); (15706 13293402 C T); (15707 13293513 T C); (15708 13293594 C T); (15709 13294168 C T); (15710
13294592 C T); (15711 13295385 C T); (15712 13297301 G A); (15713 13297603 G A); (15714 13297632
C T); (15715 13298307 A G); (15716 13298319 A G); (15717 13298356 C T); (15718 13298371 A
G); (15719 13298373 T C); (15720 13298376 G A); (15721 13298409 C T); (15722 13298620 C T); (15723
13298798 T C); (15724 13300391 A C); (15725 13300394 C T); (15726 13300892 T C); (15727 13300899 G
T); (15728 13300974 C T); (15729 13302159 A G); (15730 13302442 C T); (15731 13302620 T C); (15732
13302659 T C); (15733 13302785 G T); (15734 13302809 C A); (15735 13302858 G A); (15736 13302919
A T); (15737 13302952 C A); (15738 13303001 G A); (15739 13303021 C G); (15740 13303072 C
T); (15741 13303092 A G); (15742 13303262 A T); (15743 13303691 T G); (15744 13304574 A G); (15745
13304583 C T); (15746 13304944 T G); (15747 13304949 C A); (15748 13305153 A AT); (15749 13305198
G A); (15750 13305204 A T); (15751 13305232 T C); (15752 13305473 C T); (15753 13305596 G
GT); (15754 13305610 C G); (15755 13306247 C T); (15756 13306290 T C); (15757 13306504 C T); (15758
13306722 A AT); (15759 13307396 G T); (15760 13308000 G A); (15761 13308081 T C); (15762 13308645
C T); (15763 13309563 A G); (15764 13310188 A G); (15765 13310229 G A); (15766 13310350 T
C); (15767 13310631 G A); (15768 13310641 A T); (15769 13310865 A G); (15770 13311204 C T); (15771
13311665 G C); (15772 13311707 T C); (15773 13311762 A AT); (15774 13311881 G A); (15775
13312073 G A); (15776 13312183 C T); (15777 13312239 G A); (15778 13312240 A T); (15779 13312241
T C); (15780 13312311 T C); (15781 13312404 C T); (15782 13313637 C A); (15783 13314158 T C); (15784
13314210 C T); (15785 13314496 T C); (15786 13314723 G T); (15787 13315702 G A); (15788 13315887
G A); (15789 13315924 G C); (15790 13316318 C T); (15791 13316418 A G); (15792 13316519 T
C); (15793 13316591 G T); (15794 13316890 G A); (15795 13317298 A G); (15796 13317300 C T); (15797
13317454 G A); (15798 13317515 A G); (15799 13317606 G A); (15800 13317771 G T); (15801 13317817
C T); (15802 13317944 T C); (15803 13318160 G C); (15804 13318173 T C); (15805 13319211 G T); (15806
13319289 G A); (15807 13319712 G A); (15808 13319884 G GA); (15809 13319973 C T); (15810
13320048 C A); (15811 13320098 T C); (15812 13320275 G T); (15813 13320373 T G); (15814 13320414
T C); (15815 13320529 G A); (15816 13320530 G C); (15817 13320621 C T); (15818 13320979 C T); (15819
13320992 A T); (15820 13321527 T C); (15821 13321592 C T); (15822 13321620 A G); (15823 13322098
G A); (15824 13322162 C T); (15825 13322473 A G); (15826 13322635 G A); (15827 13322728 T
C); (15828 13322798 TTGGTCAACCATC T); (15829 13323124 C T); (15830 13323365 G A); (15831
13323744 G A); (15832 13323939 C A); (15833 13323979 C T); (15834 13324054 C T); (15835 13324102
G A); (15836 13324179 T C); (15837 13325195 C T); (15838 13325551 T C); (15839 13326045 C T); (15840
13326207 C T); (15841 13327277 C A); (15842 13327594 T C); (15843 13327905 T C); (15844 13328092 T
C); (15845 13328446 C T); (15846 13328464 C T); (15847 13328670 T C); (15848 13328867 T G); (15849
13329050 T C); (15850 13329140 C G); (15851 13329367 A C); (15852 13329793 C G); (15853 13329970
C T); (15854 13329981 A G); (15855 13330061 C T); (15856 13330065 T A); (15857 13330399 G
A); (15858 13330567 C T); (15859 13330758 C T); (15860 13330826 A G); (15861 13331059 T TA); (15862
13331141 T G); (15863 13331503 A G); (15864 13331631 G A); (15865 13331717 T G); (15866 13331727
C T); (15867 13332025 A G); (15868 13332820 AT A); (15869 13332901 G A); (15870 13333346 AG
A); (15871 13333490 A C); (15872 13333681 A G); (15873 13334390 T TA); (15874 13335078
TGGCGCCATC T); (15875 13337480 T C); (15876 13338064 G A); (15877 13339072 AAT A); (15878
13339673 A AT); (15879 13340205 G T); (15880 13340288 T G); (15881 13340810 T A); (15882 13340847
T A); (15883 13340905 C CAT); (15884 13341678 A G); (15885 13341704 G C); (15886 13342265 G
A); (15887 13342438 A C); (15888 13342509 A C); (15889 13343062 A G); (15890 13343639 T C); (15891
13344154 C G); (15892 13344260 G A); (15893 13344842 A G); (15894 13345502 C T); (15895 13345506
G A); (15896 13345552 T C); (15897 13346084 T C); (15898 13346100 G T); (15899 13346127 G
A); (15900 13346128 T C); (15901 13346172 T A); (15902 13346348 C CA); (15903 13347047 G T); (15904
13347161 A G); (15905 13347373 G GT); (15906 13347927 C T); (15907 13348243 T C); (15908 13348318
A G); (15909 13348345 C T); (15910 13348451 T C); (15911 13348472 G T); (15912 13348539 C T); (15913
13348542 A C); (15914 13348673 T C); (15915 13349060 C T); (15916 13349281 C T); (15917 13349532 C
T); (15918 13349608 A G); (15919 13349654 C T); (15920 13349670 C T); (15921 13349696 C T); (15922
13349851 A G); (15923 13350045 T C); (15924 13350100 A C); (15925 13350280 A G); (15926 13350776
GT G); (15927 13350972 C T); (15928 13351036 T C); (15929 13351260 A T); (15930 13351398 C
T); (15931 13351477 AAGT A); (15932 13351478 C A); (15933 13351479 A C); (15934 13353018 T
C); (15935 13353025 C A); (15936 13354260 C T); (15937 13354352 A AT); (15938 13354516 G A); (15939
13355668 T C); (15940 13355755 T C); (15941 13356068 A C); (15942 13356241 G T); (15943 13356250 C
T); (15944 13356286 A G); (15945 13356304 G T); (15946 13356478 C T); (15947 13356513 G A); (15948
13356637 G A); (15949 13356695 G C); (15950 13356834 C T); (15951 13356938 T C); (15952 13357074
A AT); (15953 13357177 C T); (15954 13357363 C T); (15955 13357370 C T); (15956 13357536 C
T); (15957 13357627 A T); (15958 13357774 A G); (15959 13358070 T C); (15960 13358075 G A); (15961
13358093 C T); (15962 13358199 C T); (15963 13358223 C T); (15964 13358322 C T); (15965 13358768 C
T); (15966 13358769 T C); (15967 13358770 A C); (15968 13359036 T C); (15969 13359037 C T); (15970
13359044 C T); (15971 13359109 T G); (15972 13359127 T A); (15973 13359281 G A); (15974 13359661
A G); (15975 13359738 G A); (15976 13359791 C T); (15977 13359844 G A); (15978 13360001 C
T); (15979 13360048 C T); (15980 13360136 T C); (15981 13360304 G C); (15982 13360620 A G); (15983
13361525 T A); (15984 13361741 C A); (15985 13361742 T A); (15986 13362174 A G); (15987 13362284
C T); (15988 13362459 C T); (15989 13362614 A G); (15990 13362706 CT C); (15991 13362898 T
C); (15992 13363160 G GTA); (15993 13363242 G A); (15994 13363430 G A); (15995 13363607 T
A); (15996 13363825 C T); (15997 13365143 T A); (15998 13365356 C T); (15999 13365499 A G); (16000
13365957 T C); (16001 13366186 G A); (16002 13366358 A T); (16003 13368253 C G); (16004 13368291
G A); (16005 13368370 G A); (16006 13368437 C T); (16007 13368519 G A); (16008 13368530 A
G); (16009 13368791 G GA); (16010 13368904 G A); (16011 13369065 A G); (16012 13369525 T
C); (16013 13370371 T C); (16014 13370418 C T); (16015 13370621 G T); (16016 13370827 TA T); (16017
13370992 T A); (16018 13371485 T C); (16019 13371707 A G); (16020 13371717 T C); (16021 13371981
A G); (16022 13373353 A G); (16023 13373472 T C); (16024 13373604 G A); (16025 13373626 G
T); (16026 13374557 G T); (16027 13374664 C G); (16028 13374738 A T); (16029 13374977 G A); (16030
13375018 C T); (16031 13375175 C T); (16032 13375690 A G); (16033 13375729 C A); (16034 13375830
A G); (16035 13376489 C A); (16036 13376822 C T); (16037 13377589 G A); (16038 13378089 A
C); (16039 13378718 G C); (16040 13378932 C T); (16041 13378994 C T); (16042 13379042 A C); (16043
13379045 T C); (16044 13379055 C T); (16045 13379453 C T); (16046 13379461 A G); (16047 13379750
A T); (16048 13379839 A G); (16049 13380154 C T); (16050 13380244 G A); (16051 13380552
CAACAAAAACAGATAGAATTAAACA C); (16052 13380602 T C); (16053 13380717 C T); (16054 13380752
A T); (16055 13381034 T C); (16056 13381245 T G); (16057 13381551 A G); (16058 13381732 C
G); (16059 13381787 C T); (16060 13381965 T C); (16061 13382555 T C); (16062 13383029 A G); (16063
13383094 T C); (16064 13383362 T A); (16065 13384223 C CTA); (16066 13384312 C T); (16067
13384625 C G); (16068 13384986 A T); (16069 13385044 C T); (16070 13385427 T C); (16071 13385492
G A); (16072 13385837 C T); (16073 13386663 G A); (16074 13386843 A G); (16075 13386964 C
G); (16076 13387558 T C); (16077 13387590 G T); (16078 13388089 G A); (16079 13388112 G A); (16080
13388161 T G); (16081 13388796 C A); (16082 13389150 C A); (16083 13389785 A C); (16084 13389876
A C); (16085 13389938 G A); (16086 13390162 C T); (16087 13390485 T C); (16088 13390654 T C); (16089
13390671 A G); (16090 13390938 G A); (16091 13391187 A G); (16092 13391549 T A); (16093 13391714
T TA); (16094 13391741 A G); (16095 13391906 A G); (16096 13392093 G A); (16097 13392295 A
C); (16098 13392403 T C); (16099 13392431 T C); (16100 13392940 T C); (16101 13393075 T C); (16102
13393302 G A); (16103 13393352 G A); (16104 13393375 T C); (16105 13393435 A G); (16106 13394508
C T); (16107 13394724 A G); (16108 13394791 G T); (16109 13394792 T A); (16110 13394883 A
C); (16111 13395027 G A); (16112 13395242 C T); (16113 13395290 C T); (16114 13395871 T C); (16115
13396077 CT C); (16116 13396260 C T); (16117 13396471 A C); (16118 13396636 T A); (16119 13396676
CAT C); (16120 13396723 A G); (16121 13396809 A G); (16122 13396980 G A); (16123 13397310 C
T); (16124 13397420 G A); (16125 13397437 T C); (16126 13397506 A G); (16127 13397589 G C); (16128
13397591 A T); (16129 13397772 A G); (16130 13397890 T A); (16131 13398795 C T); (16132 13398859
C T); (16133 13398989 C T); (16134 13399109 A G); (16135 13399119 A G); (16136 13399140 C
T); (16137 13399179 A C); (16138 13399277 C T); (16139 13399286 T C); (16140 13399427 T A); (16141
13399439 A T); (16142 13399927 C T); (16143 13399958 C T); (16144 13400480 G A); (16145 13401305
G A); (16146 13401430 C T); (16147 13401788 G C); (16148 13401797 G C); (16149 13401812 C
T); (16150 13401836 T G); (16151 13402126 T C); (16152 13402145 ATTGTT A); (16153 13402178 C
T); (16154 13403643 A AG); (16155 13403997 CT C); (16156 13404323 T G); (16157 13404338 T
A); (16158 13404885 T A); (16159 13406078 G A); (16160 13406592 G C); (16161 13406806 T A); (16162
13407005 T G); (16163 13407084 T A); (16164 13407290 C T); (16165 13407675 G C); (16166 13408395
T C); (16167 13408827 G C); (16168 13409293 T C); (16169 13409727 A T); (16170 13409999 G
A); (16171 13410053 G A); (16172 13410080 G A); (16173 13410088 A G); (16174 13410110 A
AT); (16175 13410182 A T); (16176 13410236 A AG); (16177 13410323 A G); (16178 13410489 T
C); (16179 13410632 C T); (16180 13410685 C A); (16181 13410690 C T); (16182 13410737 T C); (16183
13411521 T C); (16184 13411641 A G); (16185 13411740 C T); (16186 13411882 C G); (16187 13412028
C T); (16188 13412319 CGATTT C); (16189 13412686 A G); (16190 13412809 T C); (16191 13412993 G
A); (16192 13413126 T C); (16193 13413545 G A); (16194 13413601 T C); (16195 13414073 C T); (16196
13414357 T A); (16197 13414358 T A); (16198 13414471 A G); (16199 13414608 A C); (16200 13414619
C T); (16201 13414693 A G); (16202 13414753 C T); (16203 13414762 T C); (16204 13415202 A
G); (16205 13415263 T G); (16206 13416421 T C); (16207 13416501 TC T); (16208 13416865 C G); (16209
13417917 A ACAGG); (16210 13418100 C A); (16211 13418117 G A); (16212 13419574 C T); (16213
13419723 C T); (16214 13419813 C T); (16215 13419849 A G); (16216 13419861 T TA); (16217 13419941
A T); (16218 13420163 AT A); (16219 13420307 C A); (16220 13420375 A AT); (16221 13420449 T
C); (16222 13421157 C T); (16223 13421465 T C); (16224 13421716 G T); (16225 13421968 A G); (16226
13422062 A G); (16227 13422590 C T); (16228 13423195 A G); (16229 13423289 T G); (16230 13423295
C T); (16231 13423779 A C); (16232 13423907 G A); (16233 13423962 G A); (16234 13423974 G
A); (16235 13424525 A G); (16236 13424945 C A); (16237 13425209 G A); (16238 13425678 T C); (16239
13425713 T TA); (16240 13426315 T C); (16241 13426412 T C); (16242 13426750 G C); (16243 13426812
T C); (16244 13426885 A G); (16245 13426908 C T); (16246 13426936 T C); (16247 13427630 T C); (16248
13428056 C T); (16249 13428524 T A); (16250 13428678 C A); (16251 13429960 T C); (16252 13430030
G A); (16253 13430777 A G); (16254 13430904 CAGGCCCAAGAAGCACCA C); (16255 13431256 C
T); (16256 13431463 TC T); (16257 13431494 A G); (16258 13431522 G A); (16259 13432114 G T); (16260
13432183 CT C); (16261 13432222 T G); (16262 13432315 A C); (16263 13432356 G A); (16264 13432426
C T); (16265 13433390 A G); (16266 13433709 C G); (16267 13433720 C T); (16268 13434907 C
A); (16269 13435151 T C); (16270 13435539 A G); (16271 13435651 G A); (16272 13435658 T C); (16273
13435680 G T); (16274 13435728 A G); (16275 13435897 T C); (16276 13436026 C T); (16277 13436102
A G); (16278 13436151 C T); (16279 13437038 C A); (16280 13437379 G A); (16281 13438054 G
C); (16282 13438185 T G); (16283 13438305 C T); (16284 13438343 A G); (16285 13439085 G A); (16286
13439130 G T); (16287 13440047 C G); (16288 13440161 G A); (16289 13440301 A C); (16290 13440766
G A); (16291 13441165 G A); (16292 13441589 C T); (16293 13441630 T C); (16294 13441681 A
G); (16295 13441755 C T); (16296 13441773 T G); (16297 13441966 G A); (16298 13442247 T G); (16299
13442326 C A); (16300 13442398 C T); (16301 13442863 T A); (16302 13443782 AC A); (16303 13443861
A G); (16304 13444235 C T); (16305 13444640 G A); (16306 13444782 T C); (16307 13445264 A
T); (16308 13445328 C T); (16309 13445374 C T); (16310 13445432 T C); (16311 13445468 T C); (16312
13445650 G A); (16313 13445924 A G); (16314 13445966 C T); (16315 13446061 C T); (16316 13446226
T A); (16317 13447184 T C); (16318 13447256 T C); (16319 13447305 G A); (16320 13447638 T A); (16321
13447755 G A); (16322 13447894 G A); (16323 13448923 A G); (16324 13449598 G
GATGTTGGAT); (16325 13449684 T C); (16326 13449907 A G); (16327 13451004 A G); (16328 13451198
A T); (16329 13451370 C A); (16330 13451804 G C); (16331 13452098 T C); (16332 13452721 T
G); (16333 13453006 GGT G); (16334 13453012 A G); (16335 13453228 C T); (16336 13453472 T
A); (16337 13453546 A T); (16338 13453715 C T); (16339 13453793 C T); (16340 13454384 A C); (16341
13454620 A G); (16342 13454860 G T); (16343 13454941 AAAAGTTT A); (16344 13455166 G T); (16345
13455221 G A); (16346 13455793 C T); (16347 13455818 T G); (16348 13456500 G A); (16349 13456558
C T); (16350 13457017 A G); (16351 13457136 C T); (16352 13457938 A G); (16353 13458033 AC
A); (16354 13458247 C T); (16355 13458308 T C); (16356 13458473 A G); (16357 13458610 C T); (16358
13458751 G A); (16359 13459257 G A); (16360 13459294 A G); (16361 13459317 G A); (16362 13459510
T C); (16363 13459555 C T); (16364 13459591 A C); (16365 13459595 C T); (16366 13459655 G A); (16367
13460264 T G); (16368 13460301 T TG); (16369 13460667 G T); (16370 13460694 A T); (16371 13460872
G A); (16372 13462280 GT G); (16373 13462780 T TA); (16374 13462979 A T); (16375 13463178 A
G); (16376 13463233 A G); (16377 13463965 C T); (16378 13463966 A T); (16379 13465167 TA T); (16380
13465269 T A); (16381 13465324 T C); (16382 13465415 G C); (16383 13466193 G A); (16384 13466255
A G); (16385 13466398 C T); (16386 13466698 C T); (16387 13467152 C T); (16388 13467240 T A); (16389
13467503 AT A); (16390 13467813 T C); (16391 13467815 T C); (16392 13467819 T C); (16393 13467821
T C); (16394 13467823 T C); (16395 13467831 T C); (16396 13468145 A T); (16397 13468164 C T); (16398
13468303 T C); (16399 13468405 A T); (16400 13468838 A C); (16401 13468844 C A); (16402 13469208
A G); (16403 13469233 A C); (16404 13469234 C T); (16405 13469275 C T); (16406 13469291 A
C); (16407 13469332 C T); (16408 13469499 T A); (16409 13469799 G C); (16410 13470014 C T); (16411
13470131 A C); (16412 13470164 TA T); (16413 13470307 T C); (16414 13470447 A AT); (16415
13470571 C G); (16416 13471761 T C); (16417 13471784 TAATTG T); (16418 13471789 C T); (16419
13471858 C CT); (16420 13471881 G C); (16421 13471908 C T); (16422 13472060 TTTG T); (16423
13472354 G T); (16424 13472429 C G); (16425 13473183 C T); (16426 13474261 A G); (16427 13475325
T C); (16428 13475411 C A); (16429 13475462 A G); (16430 13475647 C T); (16431 13475727 C
A); (16432 13475865 A G); (16433 13475866 A G); (16434 13476276 T C); (16435 13476570 C A); (16436
13476619 T C); (16437 13476784 G A); (16438 13477144 T C); (16439 13477400 G C); (16440 13477419
A G); (16441 13477988 G A); (16442 13478217 A G); (16443 13478934 C T); (16444 13479072 CG
C); (16445 13479141 C T); (16446 13479557 A G); (16447 13479746 G T); (16448 13480092 C T); (16449
13480142 G A); (16450 13480607 C A); (16451 13480622 G A); (16452 13480682 T C); (16453 13480795
C T); (16454 13480897 A G); (16455 13481634 A AAT); (16456 13481710 A G); (16457 13481961 G
GT); (16458 13482643 T C); (16459 13483414 T G); (16460 13483685 A C); (16461 13483846 A G); (16462
13484597 T C); (16463 13484598 T C); (16464 13484629 G A); (16465 13485367 C T); (16466 13485513
A G); (16467 13485631 C T); (16468 13485728 G A); (16469 13485827 T C); (16470 13486168 G
A); (16471 13486841 A T); (16472 13486871 G A); (16473 13486893 A G); (16474 13487028 A G); (16475
13487237 G A); (16476 13487260 A G); (16477 13487910 T C); (16478 13488059 C T); (16479 13488537
G A); (16480 13488699 C T); (16481 13489001 G A); (16482 13489700 T G); (16483 13490038 A
G); (16484 13490441 G A); (16485 13490698 C T); (16486 13491593 A T); (16487 13492154 A G); (16488
13492516 G A); (16489 13493086 A G); (16490 13493208 T G); (16491 13493240 C T); (16492 13493292
A G); (16493 13493400 C T); (16494 13493887 C T); (16495 13494026 T C); (16496 13494157 C A); (16497
13494324 A G); (16498 13494350 G A); (16499 13494417 G A); (16500 13494444 T C); (16501 13495147
C T); (16502 13495241 T C); (16503 13495417 C CAA); (16504 13495421 C G); (16505 13495921 C
T); (16506 13496123 G A); (16507 13496746 G A); (16508 13496957 T C); (16509 13496979 T A); (16510
13497121 G C); (16511 13497537 G A); (16512 13497666 G A); (16513 13497706 G A); (16514 13498265
C T); (16515 13498359 G C); (16516 13498375 A G); (16517 13498662 C A); (16518 13498772 A
G); (16519 13498821 C T); (16520 13498975 A C); (16521 13499389 A G); (16522 13500811 G A); (16523
13501146 G A); (16524 13502281 C T); (16525 13502549 T C); (16526 13502624 A G); (16527 13502983
T G); (16528 13503168 T C); (16529 13503598 A AG); (16530 13503708 A G); (16531 13504051 AC
A); (16532 13504123 T A); (16533 13504169 A G); (16534 13504953 G T); (16535 13504999 T C); (16536
13505048 A G); (16537 13505083 C T); (16538 13505146 G T); (16539 13505337 A T); (16540 13505722
A G); (16541 13506371 G A); (16542 13506644 T C); (16543 13506661 C G); (16544 13507276 T
TC); (16545 13507424 C T); (16546 13507962 A G); (16547 13508198 G A); (16548 13508213 G A); (16549
13508402 C T); (16550 13508671 T C); (16551 13508903 G A); (16552 13508920 T A); (16553 13509052
A G); (16554 13509173 C T); (16555 13509200 G A); (16556 13509741 A G); (16557 13509758 C
T); (16558 13510549 G A); (16559 13510592 A G); (16560 13510741 A T); (16561 13511035 T G); (16562
13511157 T TA); (16563 13511231 T C); (16564 13511534 T C); (16565 13511727 C A); (16566 13512764
T G); (16567 13512984 GA G); (16568 13513560 A G); (16569 13513679 G GA); (16570 13513743 GA
G); (16571 13514394 A G); (16572 13514595 C T); (16573 13514630 T A); (16574 13515036 G A); (16575
13515048 G T); (16576 13515100 C T); (16577 13515335 C T); (16578 13515469 G A); (16579 13515513
A G); (16580 13515541 C T); (16581 13515567 C T); (16582 13515579 C T); (16583 13516160 G
A); (16584 13516324 C A); (16585 13516326 AT A); (16586 13516485 G A); (16587 13516894 C T); (16588
13516909 C T); (16589 13516985 C T); (16590 13517096 C T); (16591 13518584 G A); (16592 13518614 C
T); (16593 13519023 C CAAACCCT); (16594 13519250 T C); (16595 13519298 T C); (16596 13519438 G
A); (16597 13519760 G C); (16598 13519786 C T); (16599 13519884 G A); (16600 13519950 C T); (16601
13520051 A G); (16602 13520123 G A); (16603 13520477 C T); (16604 13520606 T G); (16605 13520688
C T); (16606 13520714 G GT); (16607 13520842 C T); (16608 13520853 C T); (16609 13521038 C
T); (16610 13521263 A T); (16611 13521328 A G); (16612 13521371 T C); (16613 13521549 A G); (16614
13521560 A C); (16615 13521644 G C); (16616 13521705 A G); (16617 13521713 C T); (16618 13521793
A G); (16619 13521900 C T); (16620 13522040 A C); (16621 13522232 A G); (16622 13522417 T
C); (16623 13522421 T C); (16624 13522865 A G); (16625 13523359 A C); (16626 13523585 A G); (16627
13523745 C G); (16628 13523833 G A); (16629 13523923 A G); (16630 13524129 C T); (16631 13524574
C T); (16632 13524645 G A); (16633 13525105 T C); (16634 13525188 C T); (16635 13525351 T C); (16636
13525688 T C); (16637 13525983 G A); (16638 13526020 T C); (16639 13526054 T C); (16640 13526518
G T); (16641 13526794 C T); (16642 13526826 A C); (16643 13527000 A ATC); (16644 13527110 A
G); (16645 13527119 G A); (16646 13527279 C T); (16647 13527504 T A); (16648 13527620 T G); (16649
13527959 T G); (16650 13529154 A C); (16651 13529156 G GTGTAATGTTAATATTTTTTT); (16652
13529897 C T); (16653 13530454 T C); (16654 13530678 C A); (16655 13530704 G A); (16656 13531327
A G); (16657 13531639 C T); (16658 13531880 A T); (16659 13532101 T C); (16660 13532237 G
A); (16661 13532247 G A); (16662 13532259 A T); (16663 13532451 AC A); (16664 13532528 G
A); (16665 13533567 G T); (16666 13533783 G A); (16667 13534380 A T); (16668 13534381 C T); (16669
13534384 G A); (16670 13535107 T C); (16671 13535149 A G); (16672 13535183 A G); (16673 13535246
C T); (16674 13535567 A G); (16675 13535580 G A); (16676 13535586 C T); (16677 13536501 G
T); (16678 13536519 C T); (16679 13536612 T C); (16680 13536947 G A); (16681 13537318 C T); (16682
13538674 C T); (16683 13538848 C T); (16684 13538949 A G); (16685 13538986 C T); (16686 13539526
A G); (16687 13539674 C T); (16688 13539860 G A); (16689 13540170 T C); (16690 13540450 T
G); (16691 13540989 A G); (16692 13541020 G A); (16693 13541044 G A); (16694 13541887 A G); (16695
13542402 T G); (16696 13542441 T C); (16697 13542559 A C); (16698 13543401 G A); (16699 13543452
G C); (16700 13543457 G C); (16701 13543823 G A); (16702 13543972 C T); (16703 13544046 C
G); (16704 13544239 G A); (16705 13545402 C T); (16706 13546019 C T); (16707 13546052 C T); (16708
13546373 C A); (16709 13546678 T C); (16710 13546695 A G); (16711 13546697 A G); (16712 13546953
A C); (16713 13546957 G T); (16714 13547574 T C); (16715 13549067 T C); (16716 13549179 C T); (16717
13549461 T TC); (16718 13549761 C T); (16719 13549944 C A); (16720 13549951 A T); (16721 13550448
A G); (16722 13550722 A G); (16723 13550774 C A); (16724 13550859 G C); (16725 13551375 T
C); (16726 13551547 T C); (16727 13551616 A C); (16728 13551668 C T); (16729 13552734 C T); (16730
13552814 T C); (16731 13553117 A T); (16732 13554318 T C); (16733 13554546 C T); (16734 13555043 A
C); (16735 13555084 A G); (16736 13555142 T C); (16737 13555168 C T); (16738 13555190 T C); (16739
13555242 CA C); (16740 13555947 A G); (16741 13556110 A C); (16742 13556545 C A); (16743
13556568 C A); (16744 13556640 A G); (16745 13556944 A G); (16746 13557045 G T); (16747 13557200
T A); (16748 13557635 C A); (16749 13557700 T C); (16750 13557728 G T); (16751 13557798 C T); (16752
13557815 T C); (16753 13557919 A G); (16754 13558374 G A); (16755 13558665 G A); (16756 13558847
C T); (16757 13558926 T C); (16758 13559253 T C); (16759 13559385 G T); (16760 13559545 G C); (16761
13559917 T TA); (16762 13560687 A G); (16763 13562100 C T); (16764 13562213 T C); (16765 13562368
T C); (16766 13563021 C T); (16767 13563209 G T); (16768 13563511 C G); (16769 13563741 T C); (16770
13564437 T C); (16771 13564487 G A); (16772 13564590 T C); (16773 13564617 T C); (16774 13566338 T
TGCAA); (16775 13566356 A G); (16776 13566491 A G); (16777 13566707 A G); (16778 13566876 T
C); (16779 13567273 C T); (16780 13567552 C T); (16781 13568294 TC T); (16782 13568386 C T); (16783
13568423 C T); (16784 13568435 T C); (16785 13568482 G C); (16786 13568488 T C); (16787 13568792 A
C); (16788 13569055 T C); (16789 13569083 G A); (16790 13569084 G A); (16791 13569190 G A); (16792
13569195 G C); (16793 13569198 T G); (16794 13569253 T G); (16795 13569261 T C); (16796 13569302
CT); (16797 13570047 C A); (16798 13570150 C T); (16799 13570219 A G); (16800 13570624 C T); (16801
13570727 G C); (16802 13570792 T C); (16803 13570936 C T); (16804 13571089 T TA); (16805 13571110
T G); (16806 13571125 G A); (16807 13571231 T C); (16808 13571275 G A); (16809 13571301 C
G); (16810 13571597 C T); (16811 13571899 G A); (16812 13572083 G T); (16813 13572835 G A); (16814
13572981 A G); (16815 13573436 A T); (16816 13573524 A G); (16817 13574385 A C); (16818 13574421
C T); (16819 13575791 A G); (16820 13575822 G T); (16821 13575906 A G); (16822 13576130 C
T); (16823 13576790 A G); (16824 13576794 C T); (16825 13577849 C T); (16826 13577854 C A); (16827
13578030 G A); (16828 13579953 T C); (16829 13580936 C A); (16830 13581058 G A); (16831 13582046
A G); (16832 13582270 T C); (16833 13582438 A G); (16834 13582574 A G); (16835 13582663 C
A); (16836 13582699 G T); (16837 13582909 C T); (16838 13583319 T C); (16839 13583328 G A); (16840
13583443 G A); (16841 13583720 C A); (16842 13584191 G A); (16843 13584227 C CA); (16844
13584275 G C); (16845 13584354 T C); (16846 13584393 A G); (16847 13584539 G A); (16848 13584571
A C); (16849 13584721 T C); (16850 13584771 T C); (16851 13585262 C T); (16852 13585352 T C); (16853
13585356 A G); (16854 13585549 T G); (16855 13585762 C A); (16856 13586191 A G); (16857 13586599
G A); (16858 13587089 C T); (16859 13587504 A G); (16860 13587795 C T); (16861 13587857 T
C); (16862 13588270 C G); (16863 13596146 T C); (16864 13596195 A C); (16865 13596222 T C); (16866
13596238 C T); (16867 13596315 A G); (16868 13596323 T C); (16869 13596353 GT G); (16870 13596428
G A); (16871 13596429 A C); (16872 13599512 C G); (16873 13599700 A G); (16874 13600196 C
T); (16875 13600348 A G); (16876 13600423 A G); (16877 13601231 T C); (16878 13601279 T G); (16879
13601729 T C); (16880 13601959 C T); (16881 13601991 A G); (16882 13602137 T C); (16883 13602178
G A); (16884 13602316 T C); (16885 13602321 C T); (16886 13602934 T C); (16887 13603446 A
G); (16888 13603510 T C); (16889 13603708 T C); (16890 13603806 T C); (16891 13605607 C A); (16892
13605658 C T); (16893 13605770 C A); (16894 13606002 C T); (16895 13606663 A T); (16896 13606925
G A); (16897 13607576 T A); (16898 13607698 A G); (16899 13607730 T A); (16900 13607946 G
T); (16901 13608090 G A); (16902 13608127 CT C); (16903 13608161 A G); (16904 13608178 G A); (16905
13608231 A G); (16906 13608513 G A); (16907 13608857 C T); (16908 13608922 T C); (16909 13609165
G A); (16910 13609167 G A); (16911 13610073 A G); (16912 13613750 G T); (16913 13613929 A
C); (16914 13618997 T A); (16915 13619124 G A); (16916 13619229 T C); (16917 13619429 T G); (16918
13619438 T C); (16919 13619461 A G); (16920 13619754 G A); (16921 13619813 T G); (16922 13619850
T C); (16923 13619936 A G); (16924 13620003 G A); (16925 13620039 A G); (16926 13620061 T
C); (16927 13621055 A T); (16928 13621198 T C); (16929 13621271 T C); (16930 13621453 C
CTG); (16931 13621818 C T); (16932 13621963 AT A); (16933 13622250 A G); (16934 13622328 T
C); (16935 13622672 G A); (16936 13623537 T C); (16937 13623699 T C); (16938 13623880 C T); (16939
13623992 C T); (16940 13624011 G T); (16941 13624075 T C); (16942 13624177 C T); (16943 13624215 T
C); (16944 13624531 T C); (16945 13625056 T C); (16946 13625165 G A); (16947 13625507 G A); (16948
13625841 A G); (16949 13625853 A C); (16950 13625930 A G); (16951 13626085 G A); (16952 13626175
T C); (16953 13626217 C G); (16954 13626817 G A); (16955 13627167 A C); (16956 13628197 T
C); (16957 13628206 C T); (16958 13628460 T A); (16959 13628585 A T); (16960 13628812 G A); (16961
13629095 G A); (16962 13629867 G A); (16963 13630047 C T); (16964 13630088 C T); (16965 13630431
A T); (16966 13630851 G T); (16967 13631141 T A); (16968 13631439 C T); (16969 13631450 C A); (16970
13631494 T C); (16971 13631517 C G); (16972 13632262 C T); (16973 13632307 G A); (16974 13632494
A G); (16975 13632938 T C); (16976 13633307 A C); (16977 13633321 G A); (16978 13633525 C
G); (16979 13633530 AT A); (16980 13633531 C A); (16981 13634739 T C); (16982 13634791 T
TC); (16983 13634946 G A); (16984 13635247 C T); (16985 13635294 T C); (16986 13635440 T C); (16987
13635624 G A); (16988 13635713 C T); (16989 13635857 TA T); (16990 13635861 T G); (16991 13635947
T C); (16992 13636078 T A); (16993 13636169 G A); (16994 13636778 A T); (16995 13636852 C T); (16996
13636862 T TATATATATATATATACAC); (16997 13636865 A T); (16998 13636913 A T); (16999 13637194
C T); (17000 13637317 T TTA); (17001 13637328 G A); (17002 13637644 T TA); (17003 13637867 AC
A); (17004 13638125 A AT); (17005 13638733 C T); (17006 13638737 T A); (17007 13638838 A
AGAAAAAAAGT); (17008 13639591 G A); (17009 13639768 A C); (17010 13639832 C T); (17011
13640322 A T); (17012 13640670 T G); (17013 13640877 G A); (17014 13642255 G A); (17015 13642293
T C); (17016 13643074 A G); (17017 13643326 C T); (17018 13644253 TA T); (17019 13644380 A
C); (17020 13644416 G C); (17021 13644688 T A); (17022 13644854 C T); (17023 13644937 T TA); (17024
13645121 T G); (17025 13645616 C T); (17026 13645702 T G); (17027 13645767 C A); (17028 13646922
A G); (17029 13647366 T C); (17030 13647386 C A); (17031 13647560 C T); (17032 13647582 C T); (17033
13647791 G A); (17034 13647810 C T); (17035 13650693 G A); (17036 13651049 T C); (17037 13651086
G A); (17038 13651365 A C); (17039 13651371 G A); (17040 13651406 T C); (17041 13652291 G
A); (17042 13652319 T G); (17043 13652568 C T); (17044 13652945 G A); (17045 13653301 C A); (17046
13653504 A C); (17047 13654063 T C); (17048 13654087 T C); (17049 13654562 T G); (17050 13654579
G A); (17051 13655287 T C); (17052 13655323 G A); (17053 13655422 A G); (17054 13655535 G
C); (17055 13655693 A G); (17056 13655706 AT A); (17057 13655917 A G); (17058 13656607 A
G); (17059 13656727 T C); (17060 13656941 C T); (17061 13657975 G A); (17062 13658116 C T); (17063
13658271 G C); (17064 13658345 T C); (17065 13658363 C A); (17066 13658496 T C); (17067 13658755
A G); (17068 13658793 C T); (17069 13658941 C T); (17070 13658981 C T); (17071 13658992 G
A); (17072 13659564 T C); (17073 13659569 C T); (17074 13659846 C T); (17075 13660198 T C); (17076
13660199 A G); (17077 13660285 G A); (17078 13660452 C G); (17079 13660603 C T); (17080 13661166
T C); (17081 13661293 G A); (17082 13661465 T C); (17083 13661562 T C); (17084 13661849 G
A); (17085 13662123 G A); (17086 13662254 C T); (17087 13662473 C T); (17088 13662507 A G); (17089
13662626 A G); (17090 13662768 T C); (17091 13662828 G A); (17092 13663386 C T); (17093 13663389
A G); (17094 13663843 A G); (17095 13664959 C T); (17096 13665140 T C); (17097 13665264 A
G); (17098 13665431 C T); (17099 13665446 C A); (17100 13665575 G A); (17101 13666109 T A); (17102
13667337 T G); (17103 13667347 A G); (17104 13667571 A AT); (17105 13667963 G A); (17106
13668694 A G); (17107 13670499 T G); (17108 13673059 T C); (17109 13673645 G A); (17110 13673676
C A); (17111 13674785 C A); (17112 13674903 A G); (17113 13675201 G A); (17114 13675237 A
G); (17115 13675848 C T); (17116 13676043 A G); (17117 13676244 G A); (17118 13676791 T C); (17119
13677135 C T); (17120 13677551 G A); (17121 13677561 C T); (17122 13677594 C T); (17123 13677743
G A); (17124 13677900 T C); (17125 13677969 G A); (17126 13678368 T C); (17127 13678491 G
A); (17128 13678538 C T); (17129 13678554 G A); (17130 13679199 A G); (17131 13679263 A G); (17132
13679515 T C); (17133 13679582 G A); (17134 13679612 A G); (17135 13679763 G T); (17136 13679870
G A); (17137 13679872 T C); (17138 13679932 G A); (17139 13680045 A G); (17140 13680057 G
A); (17141 13680092 C T); (17142 13680149 C G); (17143 13680305 T A); (17144 13680393 A G); (17145
13680664 T TA); (17146 13680710 G T); (17147 13680769 A G); (17148 13680797 G A); (17149
13680810 T C); (17150 13680924 A AT); (17151 13681090 T C); (17152 13681529 C T); (17153 13681544
A G); (17154 13682097 G A); (17155 13682622 T C); (17156 13682639 A G); (17157 13682708 C
T); (17158 13682839 C T); (17159 13683192 C T); (17160 13683318 G T); (17161 13683406 T C); (17162
13683931 C A); (17163 13684366 T C); (17164 13684437 G A); (17165 13684552 T C); (17166 13684568
C T); (17167 13684699 T C); (17168 13684760 C T); (17169 13684794 T C); (17170 13684945 G A); (17171
13685059 A G); (17172 13685202 T C); (17173 13685237 A G); (17174 13685274 G C); (17175 13685474
G A); (17176 13685540 A G); (17177 13685559 C T); (17178 13685617 G A); (17179 13685631 A
G); (17180 13685992 G A); (17181 13686070 T G); (17182 13686081 T C); (17183 13686103 T C); (17184
13686187 A G); (17185 13686235 C A); (17186 13686279 T C); (17187 13686617 T C); (17188 13686655
G A); (17189 13686676 A T); (17190 13686860 T A); (17191 13686911 T A); (17192 13687151 T C); (17193
13688956 T C); (17194 13689192 C A); (17195 13689270 T C); (17196 13689693 C T); (17197 13689797 A
G); (17198 13689872 C CT); (17199 13690044 G A); (17200 13690291 G A); (17201 13690696 A
C); (17202 13690713 G C); (17203 13690764 T C); (17204 13690877 G A); (17205 13691140 A T); (17206
13691842 G C); (17207 13691993 G C); (17208 13692276 A T); (17209 13692392 C T); (17210 13692425
C A); (17211 13693163 G A); (17212 13694054 C T); (17213 13694103 A G); (17214 13694496 T
A); (17215 13694557 C G); (17216 13694584 C G); (17217 13694603 G A); (17218 13694679 T C); (17219
13695031 G A); (17220 13695219 T G); (17221 13695402 A G); (17222 13695459 C T); (17223 13695535
C G); (17224 13696255 T C); (17225 13696984 T G); (17226 13696988 C T); (17227 13697126 C T); (17228
13697195 G A); (17229 13697201 T C); (17230 13697431 T C); (17231 13697545 C T); (17232 13698019 T
C); (17233 13698184 A G); (17234 13698305 C G); (17235 13698361 G T); (17236 13698580 A G); (17237
13698792 A G); (17238 13698872 A G); (17239 13699157 G A); (17240 13699332 T G); (17241 13699419
G T); (17242 13700468 A C); (17243 13700531 G A); (17244 13700645 G A); (17245 13700828 A
C); (17246 13700884 G A); (17247 13701149 C A); (17248 13701189 C T); (17249 13702280 A
AAAT); (17250 13702307 A C); (17251 13702883 A G); (17252 13703452 G T); (17253 13703481 A
G); (17254 13703632 T C); (17255 13704046 A G); (17256 13704305 T C); (17257 13704719 A G); (17258
13704756 A G); (17259 13705003 C T); (17260 13705074 G A); (17261 13705743 A T); (17262 13706184
G A); (17263 13706186 T C); (17264 13706356 G A); (17265 13706448 G A); (17266 13706663 A
G); (17267 13706931 T C); (17268 13706986 C A); (17269 13707024 C T); (17270 13707057 A T); (17271
13707097 A G); (17272 13707398 T A); (17273 13707556 A G); (17274 13707884 C G); (17275 13708000
A G); (17276 13708759 C A); (17277 13708954 C T); (17278 13709601 A G); (17279 13711830 T
C); (17280 13711907 A G); (17281 13712624 T G); (17282 13712629 C CA); (17283 13712803
ACCCCCCCCCCC A); (17284 13712805 A G); (17285 13712806 G T); (17286 13714288 T C); (17287
13715971 C A); (17288 13716673 T C); (17289 13716704 T G); (17290 13729274 G T); (17291 13729872
G A); (17292 13729931 A ATT); (17293 13730782 G T); (17294 13731712 A T); (17295 13731863 C
T); (17296 13732834 T C); (17297 13733256 G A); (17298 13733455 T A); (17299 13734217 C T); (17300
13734280 T C); (17301 13734571 T C); (17302 13734617 G A); (17303 13734669 G A); (17304 13734791
A G); (17305 13734837 C A); (17306 13735360 A G); (17307 13735409 T C); (17308 13735432 G
A); (17309 13735708 T C); (17310 13736052 T C); (17311 13736093 T C); (17312 13736864 A C); (17313
13737361 A G); (17314 13737733 A G); (17315 13738076 C T); (17316 13738663 A G); (17317 13739616
T C); (17318 13739781 T C); (17319 13739786 C T); (17320 13740436 TC T); (17321 13740549 G
T); (17322 13740821 T C); (17323 13740875 C T); (17324 13740941 C T); (17325 13741131 C T); (17326
13741415 T C); (17327 13741641 G A); (17328 13741737 A G); (17329 13741804 G A); (17330 13741822
T C); (17331 13741891 T C); (17332 13741923 G A); (17333 13741943 A T); (17334 13742131 C T); (17335
13742298 T C); (17336 13742375 A G); (17337 13742597 T G); (17338 13742640 G A); (17339 13742744
G A); (17340 13743029 A G); (17341 13743083 C T); (17342 13743579 C T); (17343 13743619 G
A); (17344 13743703 T C); (17345 13743761 T C); (17346 13743827 G A); (17347 13744170 G T); (17348
13744200 A G); (17349 13744232 G A); (17350 13744355 A G); (17351 13744410 A G); (17352 13744744
C T); (17353 13744872 A G); (17354 13745111 A G); (17355 13745197 T C); (17356 13745289 G
A); (17357 13745379 C T); (17358 13745387 G A); (17359 13745988 T G); (17360 13746153 T C); (17361
13746272 A G); (17362 13746408 A G); (17363 13746481 G T); (17364 13746688 T C); (17365 13746821
T C); (17366 13747249 T C); (17367 13747549 G A); (17368 13747560 G T); (17369 13748092 A
G); (17370 13748278 T C); (17371 13748290 T C); (17372 13748485 A C); (17373 13748683 C G); (17374
13748761 A T); (17375 13748912 T C); (17376 13749173 G A); (17377 13749404 A G); (17378 13749467
A C); (17379 13749523 G A); (17380 13749524 T C); (17381 13749608 C T); (17382 13749636 T C); (17383
13749857 G A); (17384 13749917 T C); (17385 13750100 C T); (17386 13750498 A C); (17387 13750618
G A); (17388 13750931 G A); (17389 13751529 T C); (17390 13752062 A G); (17391 13752177 G
A); (17392 13752316 T C); (17393 13752745 G A); (17394 13753331 A G); (17395 13753337 A G); (17396
13753457 G A); (17397 13754568 C T); (17398 13754853 A G); (17399 13754854 T C); (17400 13754904
A G); (17401 13755249 C T); (17402 13755280 A G); (17403 13755330 G A); (17404 13755656 G
A); (17405 13755778 C T); (17406 13755869 A G); (17407 13755977 G A); (17408 13756741 T C); (17409
13756783 T C); (17410 13757096 T C); (17411 13757141 T TCCGCTTCTCCA); (17412 13757177 T
C); (17413 13757209 A G); (17414 13757219 C T); (17415 13757279 G GGCCC); (17416 13760666 T
G); (17417 13761384 A T); (17418 13761974 ATT A); (17419 13762000 A AAATAGGGGG); (17420
13762071 G A); (17421 13762901 A AATGAATT); (17422 13764153 G A); (17423 13765131 A T); (17424
13766131 C T); (17425 13766950 A G); (17426 13766991 T C); (17427 13768550 G C); (17428 13769131
A G); (17429 13769243 G C); (17430 13769792 A C); (17431 13771083 G A); (17432 13771161 CT
C); (17433 13771329 C A); (17434 13772200 C T); (17435 13772281 A G); (17436 13773585 T C); (17437
13775277 T C); (17438 13775942 G A); (17439 13776045 C T); (17440 13776256 G A); (17441 13776269
C A); (17442 13776277 C A); (17443 13777121 G C); (17444 13777555 T C); (17445 13777977 A
G); (17446 13778494 A G); (17447 13779084 C T); (17448 13779234 A G); (17449 13780025 G A); (17450
13784959 G A); (17451 13792392 A G); (17452 13793553 C G); (17453 13793555 T C); (17454 13793706
C T); (17455 13794108 C T); (17456 13794120 C T); (17457 13794313 C T); (17458 13795228 A G); (17459
13795259 G A); (17460 13795641 A G); (17461 13795765 C T); (17462 13796074 G A); (17463 13796084
A G); (17464 13796200 C T); (17465 13796302 C T); (17466 13796625 C A); (17467 13796769 T C); (17468
13796991 A G); (17469 13797045 C T); (17470 13797245 T A); (17471 13797304 C T); (17472 13797347
C T); (17473 13797398 T C); (17474 13797911 A G); (17475 13798541 T G); (17476 13798717 C T); (17477
13798728 G A); (17478 13799149 CCTGGCCCT C); (17479 13799319 T C); (17480 13799331 C T); (17481
13799864 C G); (17482 13800181 T G); (17483 13800238 A T); (17484 13800699 A T); (17485 13801519
A G); (17486 13802181 A G); (17487 13803421 T C); (17488 13805910 G A); (17489 13806156 C
T); (17490 13807277 C T); (17491 13807895 A G); (17492 13808024 A G); (17493 13808059 G C); (17494
13808647 T A); (17495 13809012 C T); (17496 13810279 A G); (17497 13810777 T G); (17498 13810901
C T); (17499 13810918 G A); (17500 13810993 G A); (17501 13811342 T C); (17502 13811456 G
A); (17503 13812305 A C); (17504 13812936 T C); (17505 13813648 C A); (17506 13813711 C T); (17507
13813917 A G); (17508 13814457 G A); (17509 13814881 A G); (17510 13815538 G A); (17511 13817224
T C); (17512 13817599 T C); (17513 13818138 C T); (17514 13818328 C T); (17515 13818928 T C); (17516
13818931 T C); (17517 13819608 TA T); (17518 13819826 G A); (17519 13820528 G A); (17520 13820530
T C); (17521 13820823 A G); (17522 13821307 C T); (17523 13821519 G A); (17524 13822123 G
A); (17525 13822380 A C); (17526 13825200 T C); (17527 13825317 C T); (17528 13825680 C T); (17529
13826896 C T); (17530 13827248 C T); (17531 13827602 C T); (17532 13827641 G T); (17533 13828028 A
C); (17534 13828116 T C); (17535 13829251 C T); (17536 13829419 A T); (17537 13829587 C T); (17538
13829660 A G); (17539 13830011 T G); (17540 13830533 G C); (17541 13831155 G C); (17542 13831164
G A); (17543 13831216 T G); (17544 13831297 A G); (17545 13831633 C T); (17546 13831684 A
G); (17547 13831880 A G); (17548 13831960 G C); (17549 13832067 G A); (17550 13832219 A G); (17551
13832323 T C); (17552 13832737 A G); (17553 13832814 G A); (17554 13832824 C T); (17555 13832880
T C); (17556 13832975 G A); (17557 13833149 G T); (17558 13833533 A G); (17559 13833563 T
C); (17560 13833950 T C); (17561 13834038 G C); (17562 13835004 A G); (17563 13835363 T C); (17564
13836169 CA C); (17565 13836393 T C); (17566 13836617 G C); (17567 13837206 T
TATAATAATAATAATAATAATAATA); (17568 13839056 T TAC); (17569 13839560 T G); (17570 13839903 A
G); (17571 13840836 T A); (17572 13842118 A G); (17573 13842314 G A); (17574 13843394 C T); (17575
13844198 A G); (17576 13844557 T G); (17577 13844811 G A); (17578 13844959 TG T); (17579
13845058 C G); (17580 13845079 G A); (17581 13845155 C T); (17582 13845210 G A); (17583 13845214
C T); (17584 13845238 A G); (17585 13845260 A G); (17586 13846405 G T); (17587 13846882 T
TA); (17588 13847997 A G); (17589 13849485 T C); (17590 13849805 AT A); (17591 13849961 C
G); (17592 13850319 A G); (17593 13850349 C T); (17594 13853644 C T); (17595 13856558 A G); (17596
13856766 C T); (17597 13856793 A G); (17598 13857672 C T); (17599 13857822 G A); (17600 13859134
C T); (17601 13860121 A G); (17602 13860195 T C); (17603 13860259 G A); (17604 13860937 A
G); (17605 13861441 TG T); (17606 13861940 G T); (17607 13861951 G C); (17608 13862427 G
A); (17609 13862429 G A); (17610 13863177 C A); (17611 13863377 G T); (17612 13863546 C A); (17613
13863882 C T); (17614 13863911 T C); (17615 13864524 T G); (17616 13865020 T C); (17617 13866255 C
T); (17618 13866515 A G); (17619 13866586 T C); (17620 13866618 G C); (17621 13866736 A C); (17622
13866824 C T); (17623 13869836 C A); (17624 13870061 C T); (17625 13870180 C T); (17626 13870211 G
A); (17627 13870233 G C); (17628 13871984 T C); (17629 13872589 A G); (17630 13873099 G A); (17631
13873163 T G); (17632 13873218 G C); (17633 13873290 C T); (17634 13873315 T A); (17635 13873340
A C); (17636 13873823 C T); (17637 13875446 AG A); (17638 13877105 T C); (17639 13877212 G
T); (17640 13878030 C T); (17641 13878361 A G); (17642 13879381 C T); (17643 13879595 G A); (17644
13879649 A C); (17645 13879702 C T); (17646 13880183 C T); (17647 13881419 C A); (17648 13882164 C
A); (17649 13882690 A T); (17650 13882811 A G); (17651 13883088 T C); (17652 13883159 G T); (17653
13883274 G A); (17654 13887179 C T); (17655 13889275 G A); (17656 13889420 C T); (17657 13890414
C A); (17658 13890446 T G); (17659 13891884 C T); (17660 13892451 T TAAATAA); (17661 13892554 T
A); (17662 13892572 T C); (17663 13892611 A G); (17664 13892641 G T); (17665 13894021 G T); (17666
13897547 T A); (17667 13897818 T A); (17668 13898548 C T); (17669 13899419 C T); (17670 13899488
AATACCACAAATTTGAT A); (17671 13900943 T C); (17672 13901062 G A); (17673 13901439 G A); (17674
13901474 G C); (17675 13901879 A G); (17676 13901977 A G); (17677 13902159 G A); (17678 13902378
G A); (17679 13902512 C T); (17680 13903073 T C); (17681 13903466 G A); (17682 13904579 G
A); (17683 13905616 G GT); (17684 13906025 A G); (17685 13906176 C T); (17686 13906489 G
A); (17687 13907632 A G); (17688 13907708 A G); (17689 13908339 T G); (17690 13909481 T C); (17691
13910058 C A); (17692 13910963 A G); (17693 13911434 G A); (17694 13911631 A T); (17695 13912298
T G); (17696 13912340 T C); (17697 13912448 C T); (17698 13912502 A G); (17699 13913063 G
A); (17700 13913538 C T); (17701 13914647 T G); (17702 13914708 TTTGA T); (17703 13914917 G
A); (17704 13916568 G A); (17705 13916797 G A); (17706 13916839 C T); (17707 13918930 G A); (17708
13918975 G A); (17709 13919347 T C); (17710 13919558 T G); (17711 13919649 G T); (17712 13920669
T C); (17713 13921686 T C); (17714 13922461 T G); (17715 13923516 G T); (17716 13924424 C T); (17717
13924684 C G); (17718 13924730 T G); (17719 13924796 T C); (17720 13925597 A G); (17721 13925869
C A); (17722 13926041 G A); (17723 13929822 A T); (17724 13930100 A T); (17725 13930112 G
A); (17726 13930571 A G); (17727 13931467 T C); (17728 13932399 C T); (17729 13932408 T C); (17730
13932435 A G); (17731 13932736 G A); (17732 13933573 G A); (17733 13934428 C T); (17734 13934928
G A); (17735 13936596 A G); (17736 13936736 T C); (17737 13936787 C T); (17738 13937209 T
G); (17739 13937460 GCAAAATC G); (17740 13939252 G T); (17741 13939536 G A); (17742 13942320 A
G); (17743 13942669 G A); (17744 13943260 G A); (17745 13944393 T C); (17746 13945351 G A); (17747
13946921 A G); (17748 13947290 A G); (17749 13947818 G A); (17750 13948016 G A); (17751 13948065
C G); (17752 13948434 G C); (17753 13948701 AAG A); (17754 13949384 G C); (17755 13949439 G
A); (17756 13950524 C T); (17757 13952241 C G); (17758 13952881 C G); (17759 13952898 A G); (17760
13953643 C T); (17761 13954746 T C); (17762 13956776 C T); (17763 13957258 A G); (17764 13958611
A T); (17765 13959207 T C); (17766 13959606 T A); (17767 13960391 A T); (17768 13960472 C A); (17769
13963433 G A); (17770 13963485 T C); (17771 13963896 A T); (17772 13964058 A G); (17773 13964147
T G); (17774 13964527 A G); (17775 13965510 G A); (17776 13965886 C T); (17777 13967695 T
A); (17778 13967863 T G); (17779 13967888 A G); (17780 13967996 A C); (17781 13968611 T C); (17782
13969324 G A); (17783 13969564 A T); (17784 13971016 C T); (17785 13971874 A G); (17786 13973617
T G); (17787 13973656 G A); (17788 13974321 C A); (17789 13974577 C A); (17790 13974630 G
A); (17791 13974720 AAAATG A); (17792 13974956 C G); (17793 13976384 T A); (17794 13976819 A
C); (17795 13976953 T C); (17796 13977376 T A); (17797 13977490 A AAC); (17798 13978025 ATG
A); (17799 13981571 A G); (17800 13981747 G A); (17801 13982424 A G); (17802 13982510 A
AC); (17803 13982945 G T); (17804 13983032 A G); (17805 13983040 A C); (17806 13983338 T C); (17807
13983354 A G); (17808 13983654 C T); (17809 13983793 T C); (17810 13983955 G A); (17811 13984370
C T); (17812 13984497 T C); (17813 13984680 C G); (17814 13984719 T C); (17815 13984825 C T); (17816
13985431 CA C); (17817 13985678 T G); (17818 13985960 T G); (17819 13986121 C T); (17820 13986166
T A); (17821 13986645 C T); (17822 13987540 T A); (17823 13987966 C T); (17824 13987984 A T); (17825
13988002 G A); (17826 13988158 C T); (17827 13988185 T C); (17828 13988287 T C); (17829 13988311
GC G); (17830 13989195 T C); (17831 13990047 T C); (17832 13990100 C T); (17833 13990103 T
C); (17834 13990144 T C); (17835 13990341 A G); (17836 13990619 T C); (17837 13990685 T A); (17838
13990778 T C); (17839 13990966 C T); (17840 13991193 T G); (17841 13991744 C T); (17842 13992776
G T); (17843 13996004 A G); (17844 13996018 A G); (17845 13997671 G A); (17846 13997704 A
G); (17847 13997707 A T); (17848 13997724 G T); (17849 13997737 A G); (17850 13997790 C T); (17851
13998160 A G); (17852 13999628 G T); (17853 13999662 G C); (17854 13999676 G A); (17855 13999720
G A); (17856 13999812 G A); (17857 14000726 C T); (17858 14000758 T C); (17859 14000832 A
T); (17860 14000930 T C); (17861 14000947 G A); (17862 14000950 C T); (17863 14003199 G A); (17864
14003495 C G); (17865 14003552 T C); (17866 14003703 A G); (17867 14003896 T C); (17868 14003931
A T); (17869 14004112 G A); (17870 14004221 G A); (17871 14004497 C T); (17872 14005032 G
T); (17873 14005054 T C); (17874 14005138 G A); (17875 14005165 C T); (17876 14005269 T G); (17877
14005312 A G); (17878 14005716 T C); (17879 14005719 A G); (17880 14006296 T C); (17881 14006593
C G); (17882 14006785 A G); (17883 14007319 A G); (17884 14008898 C T); (17885 14009295 A
T); (17886 14010610 A T); (17887 14010768 T C); (17888 14010779 A T); (17889 14011009 T A); (17890
14011625 G A); (17891 14014264 T C); (17892 14015463 T TGAG); (17893 14016705 C G); (17894
14016733 C A); (17895 14016746 C CTT); (17896 14018426 G A); (17897 14018468 A G); (17898
14020416 A ATC); (17899 14021036 G T); (17900 14022468 T G); (17901 14023742 C A); (17902
14025357 ATT A); (17903 14025822 A AT); (17904 14026295 T C); (17905 14026960 A ATT); (17906
14027268 G C); (17907 14027303 C T); (17908 14027334 C T); (17909 14027335 A G); (17910 14027351
C T); (17911 14027394 C T); (17912 14027411 G A); (17913 14027512 A G); (17914 14027737 G
A); (17915 14027921 A G); (17916 14028062 T G); (17917 14028157 C T); (17918 14028393 A G); (17919
14028611 G T); (17920 14029751 G A); (17921 14029865 G A); (17922 14030752 GA G); (17923
14030817 T G); (17924 14031015 T A); (17925 14031254 T C); (17926 14031315 C T); (17927 14031462
G T); (17928 14031476 C T); (17929 14032689 C A); (17930 14033886 A G); (17931 14034267 C
G); (17932 14034293 T G); (17933 14034350 G C); (17934 14034980 T C); (17935 14035026 T C); (17936
14035179 C T); (17937 14035529 A G); (17938 14035822 C T); (17939 14036005 C G); (17940 14036149
A G); (17941 14036562 G GA); (17942 14036630 G A); (17943 14036727 G A); (17944 14036924 GA
G); (17945 14037204 C A); (17946 14037311 T G); (17947 14037395 A G); (17948 14039163 A T); (17949
14039170 C A); (17950 14039319 T G); (17951 14040289 T C); (17952 14040437 A G); (17953 14041607
G C); (17954 14043786 GA G); (17955 14044849 CAGTG C); (17956 14044938 A G); (17957 14045701 A
G); (17958 14046567 G A); (17959 14046779 ATTTG A); (17960 14047127 T G); (17961 14048102 T
TAG); (17962 14048105 A G); (17963 14048614 C T); (17964 14048679 A G); (17965 14048742 T
C); (17966 14048827 A C); (17967 14049021 A T); (17968 14049068 C T); (17969 14049167 G A); (17970
14049214 C T); (17971 14049920 G C); (17972 14050440 T C); (17973 14053603 C T); (17974 14053670 T
G); (17975 14054140 T C); (17976 14054309 A G); (17977 14060847 C T); (17978 14061513 T C); (17979
14062232 T C); (17980 14062267 A G); (17981 14062353 A C); (17982 14062462 C T); (17983 14062508
G A); (17984 14062639 C T); (17985 14062644 A G); (17986 14062775 G T); (17987 14063280 T
A); (17988 14063283 T A); (17989 14063286 T A); (17990 14063289 A AATAATAATTATT); (17991
14063644 C T); (17992 14064051 A G); (17993 14064314 G A); (17994 14064354 C T); (17995 14064396
G A); (17996 14064413 G A); (17997 14064600 T C); (17998 14064791 G T); (17999 14064975 C
A); (18000 14065116 TAATTTTTTTGTCATTTCTCA T); (18001 14065285 AT A); (18002 14065705 G
T); (18003 14066764 G A); (18004 14067413 T TA); (18005 14067515 A G); (18006 14067929 C T); (18007
14068020 G T); (18008 14068294 G C); (18009 14068411 T G); (18010 14069476 A G); (18011 14070241
G T); (18012 14070490 G A); (18013 14073229 C T); (18014 14073866 A G); (18015 14074150 C
T); (18016 14074531 C T); (18017 14075598 G A); (18018 14076609 A C); (18019 14078169 T
TTGAC); (18020 14078280 C T); (18021 14079228 AC A); (18022 14079311 T G); (18023 14079451 G
GA); (18024 14079598 A C); (18025 14079636 T A); (18026 14079864 C G); (18027 14079891 C T); (18028
14080002 T C); (18029 14080032 T A); (18030 14080751 A AT); (18031 14080989 G A); (18032 14084026
T C); (18033 14084681 T G); (18034 14084794 A G); (18035 14085876 T C); (18036 14086196 C T); (18037
14087115 C T); (18038 14087155 T C); (18039 14087587 C T); (18040 14088955 T C); (18041 14088965 C
T); (18042 14089074 C T); (18043 14089359 C T); (18044 14089462 G A); (18045 14089925 T G); (18046
14090396 T C); (18047 14091240 A G); (18048 14091768 T C); (18049 14092863 C T); (18050 14093013 C
G); (18051 14093266 A G); (18052 14093767 T A); (18053 14094657 T C); (18054 14094689 G A); (18055
14095220 A G); (18056 14095490 A G); (18057 14096390 G A); (18058 14097490 G A); (18059 14097790
G A); (18060 14098540 G A); (18061 14099919 A G); (18062 14100163 T C); (18063 14100383 C
T); (18064 14102191 T C); (18065 14102682 G A); (18066 14102953 G A); (18067 14104214 A G); (18068
14104239 C T); (18069 14104273 G A); (18070 14104317 A G); (18071 14104482 C T); (18072 14104661
C T); (18073 14105027 C T); (18074 14105982 G A); (18075 14107584 C CT); (18076 14109886 T
TA); (18077 14110824 A G); (18078 14112590 A G); (18079 14112635 A G); (18080 14114920 G
A); (18081 14115798 C T); (18082 14116036 C T); (18083 14116330 C T); (18084 14116351 GT G); (18085
14116465 ATTACTAGATAACTCATTTATTG A); (18086 14116582 G A); (18087 14116639 AT A); (18088
14117107 T C); (18089 14117134 C T); (18090 14117597 C G); (18091 14118470 T C); (18092 14118540
TCAAACATGTC T); (18093 14118544 A G); (18094 14118637 C G); (18095 14118768 G A); (18096
14118836 C T); (18097 14119498 G A); (18098 14119767 C T); (18099 14119822 C T); (18100 14119828
A G); (18101 14119857 G C); (18102 14120450 A G); (18103 14121751 AATAT A); (18104 14122106 A
G); (18105 14123849 G C); (18106 14124104 C T); (18107 14124767 G A); (18108 14125009 T C); (18109
14125268 C T); (18110 14125855 A G); (18111 14128536 T G); (18112 14128596 T G); (18113 14129343
G A); (18114 14130233 A G); (18115 14130771 G A); (18116 14131988 G C); (18117 14132039 C
A); (18118 14132200 C T); (18119 14132407 A T); (18120 14132784 C G); (18121 14132834 C A); (18122
14132986 G A); (18123 14133086 G T); (18124 14134286 C T); (18125 14134416 A G); (18126 14134641
A G); (18127 14134814 C T); (18128 14134898 G A); (18129 14135088 C T); (18130 14135452 T
A); (18131 14135499 T C); (18132 14135971 T A); (18133 14136020 AT A); (18134 14137691 G T); (18135
14137754 T A); (18136 14138132 A G); (18137 14138447 T C); (18138 14138478 T C); (18139 14138704 T
C); (18140 14138868 T C); (18141 14144176 T TA); (18142 14144565 A T); (18143 14146191 A C); (18144
14148052 A G); (18145 14148627 G A); (18146 14148719 A G); (18147 14149173 TAAAAAGCCC
T); (18148 14150260 A G); (18149 14150267 G A); (18150 14151214 G GCAC); (18151 14152332 T
TA); (18152 14152730 G A); (18153 14152864 T C); (18154 14153130 C T); (18155 14153418 T G); (18156
14154380 T A); (18157 14154842 C T); (18158 14155025 A G); (18159 14155114 A G); (18160 14155569
TTG); (18161 14155724 A T); (18162 14155727 A G); (18163 14155728 G C); (18164 14156046 A
G); (18165 14157408 T G); (18166 14160747 A G); (18167 14160748 T C); (18168 14160892 G A); (18169
14163091 C A); (18170 14163302 G T); (18171 14163721 A G); (18172 14163865 C A); (18173 14164293
C T); (18174 14164379 A C); (18175 14164910 G A); (18176 14165045 G A); (18177 14165060 G
A); (18178 14165063 C T); (18179 14165088 T G); (18180 14165109 T C); (18181 14165833 G T); (18182
14166822 G T); (18183 14168002 A G); (18184 14168423 C T); (18185 14170101 C A); (18186 14170246
G GA); (18187 14170526 C CCTGAATCCCCGCGCG); (18188 14170566 C T); (18189 14172239 C T); (18190
14174406 G A); (18191 14176391 C T); (18192 14176729 A G); (18193 14177093 C T); (18194 14177306
G A); (18195 14178364 T TGA); (18196 14178486 A G); (18197 14178490 G A); (18198 14179164 A
G); (18199 14179397 T C); (18200 14179400 A G); (18201 14179806 G T); (18202 14180427 T C); (18203
14180573 T C); (18204 14180853 A G); (18205 14181242 T C); (18206 14181435 T C); (18207 14181596
A C); (18208 14181772 T C); (18209 14181814 T C); (18210 14182137 C T); (18211 14182262 T C); (18212
14182862 C T); (18213 14182893 G A); (18214 14183173 T C); (18215 14183673 G T); (18216 14183836
G A); (18217 14186299 T G); (18218 14186888 A G); (18219 14187030 A G); (18220 14187189 T
C); (18221 14188170 G C); (18222 14188667 T C); (18223 14189271 T C); (18224 14190329 A G); (18225
14191465 T C); (18226 14191743 G A); (18227 14191801 GA G); (18228 14192351 A G); (18229
14192669 T C); (18230 14193026 C T); (18231 14193626 T C); (18232 14194458 T C); (18233 14194611 A
G); (18234 14195289 G A); (18235 14195306 C T); (18236 14195307 A C); (18237 14195371 G A); (18238
14195596 A G); (18239 14196075 C CT); (18240 14196386 G A); (18241 14196410 G T); (18242
14196681 T G); (18243 14196790 A G); (18244 14197084 G A); (18245 14198402 A G); (18246 14198556
A G); (18247 14199117 G T); (18248 14199238 C A); (18249 14199272 C G); (18250 14199578 T
TA); (18251 14199886 A G); (18252 14200033 A G); (18253 14200134 A G); (18254 14201168 T
A); (18255 14201904 G GTGAACAATGTAATCGATTACT); (18256 14203273 G A); (18257 14203274 A
T); (18258 14203782 A G); (18259 14204019 C T); (18260 14204032 A T); (18261 14204295 G A); (18262
14204641 G A); (18263 14204685 T C); (18264 14204695 G A); (18265 14204709 A G); (18266 14205081
C T); (18267 14205187 G A); (18268 14205216 A C); (18269 14205232 T C); (18270 14205260 A
C); (18271 14205279 G A); (18272 14205491 A G); (18273 14205757 T C); (18274 14208579 G T); (18275
14209111 G A); (18276 14210322 A T); (18277 14210713 G A); (18278 14210848 G T); (18279 14212809
T C); (18280 14214838 C T); (18281 14214920 G A); (18282 14216482 C T); (18283 14217164 T G); (18284
14218038 T C); (18285 14218056 C T); (18286 14218962 G C); (18287 14219473 T C); (18288 14219670 A
G); (18289 14219676 A G); (18290 14219728 G T); (18291 14220036 T C); (18292 14220398 T C); (18293
14220543 C T); (18294 14220594 T C); (18295 14220967 G A); (18296 14221528 G C); (18297 14221793
C CTGGCGCGGA); (18298 14222619 C T); (18299 14223188 C T); (18300 14223497 A G); (18301
14223627 C T); (18302 14225185 A G); (18303 14225567 C T); (18304 14225621 A T); (18305 14226402 T
C); (18306 14227225 T C); (18307 14227681 A T); (18308 14227769 T C); (18309 14228395 G A); (18310
14228802 T C); (18311 14229452 G A); (18312 14230259 T C); (18313 14230796 A G); (18314 14231580
GA); (18315 14233088 G A); (18316 14233536 C T); (18317 14233922 G A); (18318 14234416 A
C); (18319 14236155 C T); (18320 14236579 G A); (18321 14236691 G A); (18322 14237025 T C); (18323
14238014 T C); (18324 14238318 GA G); (18325 14238485 T C); (18326 14238609 C G); (18327
14239294 C T); (18328 14240016 C T); (18329 14240043 A G); (18330 14240199 C T); (18331 14240452
G A); (18332 14241097 T A); (18333 14241263 C T); (18334 14242203 A G); (18335 14242470 G
A); (18336 14242625 G A); (18337 14243238 G C); (18338 14243909 T C); (18339 14244286 T C); (18340
14244469 C G); (18341 14244927 C T); (18342 14246043 TA T); (18343 14246130 C T); (18344 14247205
T G); (18345 14247238 C T); (18346 14247464 G T); (18347 14247513 G T); (18348 14248356 T C); (18349
14248468 T G); (18350 14248526 T C); (18351 14248683 T C); (18352 14249449 C T); (18353 14250939
G A); (18354 14251242 A G); (18355 14251454 C G); (18356 14252253 C T); (18357 14252278 C
T); (18358 14252328 C T); (18359 14252358 C T); (18360 14252377 C T); (18361 14252380 A G); (18362
14253457 T G); (18363 14253768 G T); (18364 14254252 T C); (18365 14255007 G A); (18366 14255037
T C); (18367 14255389 T C); (18368 14255606 A G); (18369 14255610 C T); (18370 14256907 G
A); (18371 14257197 C T); (18372 14257327 C T); (18373 14257342 T C); (18374 14257387 A C); (18375
14257842 G A); (18376 14257856 A G); (18377 14257917 C T); (18378 14258051 C CA); (18379
14261756 T G); (18380 14263592 T G); (18381 14264041 T TA); (18382 14264619 C CTTTTCTAG); (18383
14266171 C T); (18384 14266255 G T); (18385 14267176 G A); (18386 14267206 C T); (18387 14267657
A G); (18388 14267786 A G); (18389 14268025 T C); (18390 14268452 G A); (18391 14268847 G
A); (18392 14268894 G A); (18393 14269264 C G); (18394 14269798 G A); (18395 14269800 G A); (18396
14269855 G A); (18397 14269922 T C); (18398 14270155 C T); (18399 14270392 T C); (18400 14271086 T
C); (18401 14271246 G C); (18402 14271250 T C); (18403 14271275 A C); (18404 14271415 T G); (18405
14273899 G A); (18406 14274304 C A); (18407 14274574 C T); (18408 14274719 T C); (18409 14274973
A T); (18410 14275045 A G); (18411 14275593 A T); (18412 14275689 T A); (18413 14275882 G
A); (18414 14276111 A G); (18415 14277599 C T); (18416 14277994 C T); (18417 14278287 T C); (18418
14278334 G A); (18419 14278695 C T); (18420 14279139 G A); (18421 14280198 C T); (18422 14280434
A T); (18423 14282071 G T); (18424 14282452 G T); (18425 14284300 A T); (18426 14284309 G
A); (18427 14284504 G T); (18428 14286023 G A); (18429 14286379 A G); (18430 14286677 C T); (18431
14286957 A G); (18432 14290261 C T); (18433 14292800 C A); (18434 14293004 T C); (18435 14293006
A G); (18436 14293286 C T); (18437 14294003 A G); (18438 14295462 G A); (18439 14295896 G
A); (18440 14296026 T C); (18441 14296177 T C); (18442 14296390 A G); (18443 14297387 A G); (18444
14297746 G A); (18445 14297757 G A); (18446 14297836 A G); (18447 14298402 C T); (18448 14298657
T C); (18449 14299622 A C); (18450 14300050 C A); (18451 14300468 G A); (18452 14300563 G
A); (18453 14300893 T C); (18454 14301162 C T); (18455 14302125 A G); (18456 14302245 T C); (18457
14303056 A C); (18458 14303492 G A); (18459 14304689 T C); (18460 14304896 A G); (18461 14305191
A G); (18462 14305549 A G); (18463 14305574 G C); (18464 14305929 A T); (18465 14307236 T
C); (18466 14307332 G A); (18467 14307480 C T); (18468 14308151 T C); (18469 14308156 G A); (18470
14308889 A G); (18471 14309053 T C); (18472 14309393 G T); (18473 14309689 A T); (18474 14309797
A G); (18475 14310045 C G); (18476 14310653 A T); (18477 14310758 G A); (18478 14311717 T
C); (18479 14312175 C T); (18480 14312659 C T); (18481 14313186 C T); (18482 14313940 G A); (18483
14314099 G A); (18484 14314318 C T); (18485 14314972 T G); (18486 14316132 A G); (18487 14316214
G A); (18488 14316351 G T); (18489 14316525 A T); (18490 14316814 G A); (18491 14317223 T
C); (18492 14318025 C T); (18493 14318576 C T); (18494 14318622 ACTACCCT A); (18495 14319421 C
A); (18496 14319435 C T); (18497 14321162 T A); (18498 14321599 T C); (18499 14322623 C A); (18500
14322742 G A); (18501 14323436 T C); (18502 14324153 A G); (18503 14325276 G A); (18504 14326137
A T); (18505 14326279 G A); (18506 14326337 A G); (18507 14326382 T C); (18508 14326822 T
C); (18509 14327110 T A); (18510 14327640 G A); (18511 14328122 A G); (18512 14328253 T C); (18513
14328262 A G); (18514 14328802 A G); (18515 14329307 G A); (18516 14329737 G T); (18517 14329771
C T); (18518 14331105 G A); (18519 14331647 T A); (18520 14332086 T C); (18521 14332486 A
G); (18522 14332902 G A); (18523 14333234 G C); (18524 14333640 A T); (18525 14333664 G T); (18526
14333834 A G); (18527 14334311 T G); (18528 14334628 T C); (18529 14335340 G A); (18530 14336075
C T); (18531 14337855 T A); (18532 14338160 C T); (18533 14338392 G T); (18534 14338631 A G); (18535
14339819 G C); (18536 14339946 C T); (18537 14340463 T C); (18538 14340485 C T); (18539 14340668
TA T); (18540 14340799 A G); (18541 14340907 T A); (18542 14340924 A C); (18543 14341008 C
G); (18544 14341045 G A); (18545 14341084 T C); (18546 14341296 AGTGAATG A); (18547 14341821 G
A); (18548 14342514 G A); (18549 14342681 G A); (18550 14343153 C T); (18551 14343562 G A); (18552
14343812 C T); (18553 14344266 C T); (18554 14344680 T C); (18555 14345047 G A); (18556 14345364 C
T); (18557 14345523 A G); (18558 14346004 C T); (18559 14346484 C T); (18560 14347699 C T); (18561
14347700 C T); (18562 14347991 C T); (18563 14348317 T C); (18564 14348656 T C); (18565 14348935 C
T); (18566 14349839 G A); (18567 14350166 A T); (18568 14350174 C T); (18569 14350573 C T); (18570
14350705 T G); (18571 14350707 A T); (18572 14350760 T C); (18573 14351324 A G); (18574 14351830
A G); (18575 14352342 C T); (18576 14352496 T A); (18577 14352768 T A); (18578 14352771 A T); (18579
14354710 G A); (18580 14356278 G A); (18581 14356374 T C); (18582 14357851 G A); (18583 14358098
T C); (18584 14358335 C G); (18585 14358526 C A); (18586 14359670 A G); (18587 14360588 G
A); (18588 14360603 A G); (18589 14360706 G A); (18590 14360780 G A); (18591 14360897 A C); (18592
14360903 A C); (18593 14361180 A C); (18594 14361266 C T); (18595 14361926 C T); (18596 14362001 T
C); (18597 14362566 T C); (18598 14364423 A G); (18599 14364539 C T); (18600 14364845 G A); (18601
14365144 T C); (18602 14365646 C A); (18603 14366303 G C); (18604 14366311 A T); (18605 14367525
TG T); (18606 14368458 T C); (18607 14368571 C T); (18608 14368774 C A); (18609 14368990 A
G); (18610 14369065 T C); (18611 14369556 T C); (18612 14369574 C T); (18613 14370028 A G); (18614
14370401 C T); (18615 14370435 A G); (18616 14370764 G A); (18617 14371315 C T); (18618 14371520
T A); (18619 14372693 C T); (18620 14373031 A C); (18621 14373538 T C); (18622 14373698 C T); (18623
14374001 G A); (18624 14374221 A G); (18625 14374413 G A); (18626 14375002 A G); (18627 14375464
A C); (18628 14375980 A G); (18629 14376170 T G); (18630 14376479 C A); (18631 14376650 C
A); (18632 14377458 C G); (18633 14378923 A C); (18634 14379104 C T); (18635 14379723 G A); (18636
14379941 A C); (18637 14380524 C T); (18638 14381045 T C); (18639 14381046 C T); (18640 14381590 T
G); (18641 14381892 C T); (18642 14381990 A G); (18643 14382254 C T); (18644 14384459 T C); (18645
14384714 T C); (18646 14385714 C T); (18647 14385851 G A); (18648 14385961 C G); (18649 14386162
G A); (18650 14386250 G A); (18651 14386879 C A); (18652 14387038 G A); (18653 14387055 T
TG); (18654 14387432 T C); (18655 14387511 T G); (18656 14387991 T C); (18657 14388180 C T); (18658
14388184 A C); (18659 14388248 G A); (18660 14388274 C A); (18661 14388335 G T); (18662 14389109
C A); (18663 14391220 AT A); (18664 14393788 A C); (18665 14393857 G GT); (18666 14393860 C
T); (18667 14394066 A G); (18668 14401828 T G); (18669 14401829 C T); (18670 14401941 G C); (18671
14402910 T C); (18672 14402985 G A); (18673 14403141 C T); (18674 14403577 G A); (18675 14403729
T C); (18676 14403759 A T); (18677 14404291 G A); (18678 14404643 C T); (18679 14404863 C T); (18680
14405131 G A); (18681 14405243 G T); (18682 14405345 T C); (18683 14405496 G A); (18684 14405532
A G); (18685 14405824 A G); (18686 14406205 C T); (18687 14406310 C G); (18688 14406444 T
C); (18689 14406600 T C); (18690 14406669 TG T); (18691 14407999 A G); (18692 14408085 T A); (18693
14408326 G C); (18694 14408765 G A); (18695 14410492 G T); (18696 14410665 C G); (18697 14411308
C T); (18698 14411873 G A); (18699 14411932 G A); (18700 14412463 A C); (18701 14414304 G
T); (18702 14415160 A T); (18703 14415434 A G); (18704 14416020 C T); (18705 14417178 C A); (18706
14417414 A G); (18707 14418429 T G); (18708 14419857 A AT); (18709 14419968 C A); (18710
14420860 G A); (18711 14421004 C T); (18712 14421227 C T); (18713 14421586 C T); (18714 14421589
G A); (18715 14421639 T G); (18716 14421695 T C); (18717 14421978 A G); (18718 14422030 T
C); (18719 14422464 G A); (18720 14423120 T G); (18721 14423579 G C); (18722 14423852 C A); (18723
14425078 A T); (18724 14425709 C T); (18725 14426059 TCTA T); (18726 14426649 A C); (18727
14427278 A G); (18728 14427872 A T); (18729 14428124 A G); (18730 14428402 G A); (18731 14428504
C T); (18732 14429145 T C); (18733 14429148 T C); (18734 14430456 T C); (18735 14431153 A C); (18736
14431554 A T); (18737 14431688 A T); (18738 14432136 C T); (18739 14432180 G A); (18740 14432372
T C); (18741 14432710 G A); (18742 14433306 T TA); (18743 14433678 G C); (18744 14434444 T
C); (18745 14434720 G T); (18746 14434935 A G); (18747 14435191 A AT); (18748 14435453 A
G); (18749 14436044 G A); (18750 14436345 T TA); (18751 14436472 T C); (18752 14437160 C G); (18753
14437554 G T); (18754 14438293 C T); (18755 14438512 G A); (18756 14439005 T C); (18757 14440123
A G); (18758 14440246 T C); (18759 14440699 G A); (18760 14440909 T A); (18761 14441481 A
G); (18762 14441490 T A); (18763 14442017 G A); (18764 14442361 C G); (18765 14443333 A G); (18766
14444177 A C); (18767 14445477 A G); (18768 14445518 GT G); (18769 14445895 A AT); (18770
14446678 AT A); (18771 14448394 GT G); (18772 14448619 T A); (18773 14448699 A G); (18774
14449846 C T); (18775 14450218 T C); (18776 14450252 C T); (18777 14450812 T C); (18778 14451624 C
T); (18779 14453085 C A); (18780 14453703 A C); (18781 14454300 T A); (18782 14454335 G A); (18783
14455492 T G); (18784 14455985 A G); (18785 14456050 C T); (18786 14457132 G A); (18787 14457433
T A); (18788 14458407 A AT); (18789 14458716 C T); (18790 14458963 G A); (18791 14459609 C
T); (18792 14459616 C T); (18793 14459682 C T); (18794 14459814 T C); (18795 14459888 A G); (18796
14460805 G A); (18797 14461158 A T); (18798 14461237 T TA); (18799 14461439 A G); (18800
14461517 G A); (18801 14461570 C CA); (18802 14461681 A T); (18803 14463807 TA T); (18804
14463942 C T); (18805 14463991 G A); (18806 14464441 A T); (18807 14465543 G A); (18808 14465851
T G); (18809 14466881 A C); (18810 14467764 T C); (18811 14467828 T TTATA); (18812 14468429 C
A); (18813 14470342 T C); (18814 14471453 T C); (18815 14475122 T A); (18816 14475346 C G); (18817
14476661 A G); (18818 14476833 T G); (18819 14477439 TTTTTTTCGGTTTTCAA T); (18820 14477927 C
T); (18821 14477997 T C); (18822 14481086 A T); (18823 14481143 A G); (18824 14481521 G A); (18825
14482408 G A); (18826 14482774 G T); (18827 14483921 T G); (18828 14485529 G A); (18829 14486372
T G); (18830 14486610 T C); (18831 14487005 A G); (18832 14487684 C T); (18833 14487904 A
C); (18834 14488403 C G); (18835 14489833 A G); (18836 14489856 A G); (18837 14490411 G A); (18838
14490606 T TTA); (18839 14491343 A C); (18840 14491739 G A); (18841 14492070 T C); (18842
14492134 C T); (18843 14492260 G A); (18844 14492339 G A); (18845 14493178 T C); (18846 14493797
A C); (18847 14493923 G T); (18848 14494131 T G); (18849 14495211 C T); (18850 14496238 G
A); (18851 14496380 G A); (18852 14496551 G A); (18853 14497099 G A); (18854 14497127 T C); (18855
14497581 C A); (18856 14498414 C T); (18857 14498439 A G); (18858 14498520 T C); (18859 14499043
G C); (18860 14499670 T A); (18861 14501249 T TC); (18862 14501500 C T); (18863 14501735 G
A); (18864 14504035 G A); (18865 14506300 A G); (18866 14507571 C T); (18867 14508035 G A); (18868
14508683 A G); (18869 14508903 A G); (18870 14509250 C T); (18871 14509497 C T); (18872 14509625
G A); (18873 14510042 G C); (18874 14510087 T C); (18875 14511220 C A); (18876 14511917 G
A); (18877 14513269 C A); (18878 14513758 C T); (18879 14513956 G A); (18880 14515756 A G); (18881
14516887 G C); (18882 14516888 A G); (18883 14516889 A G); (18884 14516929 C T); (18885 14517018
CG C); (18886 14517070 C T); (18887 14517073 T C); (18888 14517114 G A); (18889 14517450 T
C); (18890 14517785 T C); (18891 14517941 A G); (18892 14518142 A G); (18893 14518426 C A); (18894
14518798 T C); (18895 14519783 T G); (18896 14519873 G T); (18897 14520007 A G); (18898 14520700
C T); (18899 14520717 T A); (18900 14521077 A T); (18901 14521602 G A); (18902 14522446 T C); (18903
14526213 G A); (18904 14526344 C T); (18905 14526676 G T); (18906 14527038 G A); (18907 14527041
G A); (18908 14527194 A G); (18909 14527298 G A); (18910 14527736 C T); (18911 14527792 C
T); (18912 14528098 G A); (18913 14528949 C T); (18914 14529057 A G); (18915 14530136 G T); (18916
14530275 G A); (18917 14530725 A G); (18918 14531868 A T); (18919 14532321 C T); (18920 14532758
A G); (18921 14533034 A C); (18922 14533391 G C); (18923 14534385 G A); (18924 14534894 T
G); (18925 14535059 A G); (18926 14535245 G A); (18927 14535346 C T); (18928 14537243 A G); (18929
14537457 C T); (18930 14537686 G A); (18931 14538870 T C); (18932 14539011 G A); (18933 14539025
A G); (18934 14539695 C A); (18935 14539753 C T); (18936 14539970 C T); (18937 14540239 G
A); (18938 14540986 A G); (18939 14541841 GA G); (18940 14542665 A G); (18941 14543206 A
C); (18942 14545588 AT A); (18943 14545634 G A); (18944 14547066 G T); (18945 14547205 T A); (18946
14548137 G A); (18947 14548777 G A); (18948 14548824 C A); (18949 14549844 C T); (18950 14549857
G A); (18951 14549866 G A); (18952 14550414 T G); (18953 14551511 C T); (18954 14554313 T
G); (18955 14554527 G A); (18956 14554584 T A); (18957 14554816 C T); (18958 14555458 A T); (18959
14555963 T TA); (18960 14556272 CA C); (18961 14557512 T C); (18962 14558126 A G); (18963
14558283 A G); (18964 14558421 C T); (18965 14559162 T G); (18966 14559891 G T); (18967 14560183
G A); (18968 14560322 G A); (18969 14560396 T A); (18970 14560474 TA T); (18971 14561373 TA
T); (18972 14567603 A G); (18973 14568617 C T); (18974 14569561 A C); (18975 14569662 C A); (18976
14570020 G A); (18977 14570284 T C); (18978 14570758 C T); (18979 14570893 C T); (18980 14571002
A G); (18981 14571436 C T); (18982 14571535 C T); (18983 14571747 G A); (18984 14572085 T
C); (18985 14573188 T C); (18986 14573336 C G); (18987 14573599 A G); (18988 14573864 G A); (18989
14574511 G T); (18990 14574727 G T); (18991 14574997 G A); (18992 14575383 A G); (18993 14575626
C T); (18994 14579187 C T); (18995 14580759 G T); (18996 14581220 A C); (18997 14581911 G
A); (18998 14582083 A C); (18999 14582137 G C); (19000 14583477 C A); (19001 14584321 A G); (19002
14584419 C A); (19003 14585800 A C); (19004 14587428 A G); (19005 14588479 C G); (19006 14588708
AT A); (19007 14589989 G A); (19008 14590688 T C); (19009 14591102 G A); (19010 14591124 G
T); (19011 14591248 T C); (19012 14591421 G A); (19013 14591518 T C); (19014 14591852 A G); (19015
14591930 C T); (19016 14592023 C T); (19017 14593554 C G); (19018 14593607 C A); (19019 14593802
G A); (19020 14594159 C T); (19021 14594307 T G); (19022 14594633 G A); (19023 14594908 G
A); (19024 14594919 C T); (19025 14594927 A T); (19026 14595297 G A); (19027 14595690 G C); (19028
14595694 AAC A); (19029 14595907 T C); (19030 14596060 A G); (19031 14596289 C T); (19032
14596421 C G); (19033 14596855 C T); (19034 14596888 G A); (19035 14597433 T C); (19036 14597554
T C); (19037 14597634 C T); (19038 14597848 A G); (19039 14597929 C G); (19040 14597995 A
C); (19041 14600362 G A); (19042 14600500 G C); (19043 14601186 A G); (19044 14602530 G T); (19045
14603216 C A); (19046 14603422 TA T); (19047 14603588 G T); (19048 14605592 C T); (19049 14605602
G A); (19050 14606139 T C); (19051 14606504 T C); (19052 14607429 T C); (19053 14607603 T G); (19054
14607720 T C); (19055 14608932 A G); (19056 14609092 C T); (19057 14609307 T C); (19058 14609492
G T); (19059 14609502 C T); (19060 14609553 G T); (19061 14610755 T C); (19062 14611823 C A); (19063
14612987 T C); (19064 14613415 C A); (19065 14614348 T C); (19066 14614522 T C); (19067 14614939
GTATTTT G); (19068 14615730 T A); (19069 14616583 G C); (19070 14616633 G A); (19071 14617632 G
A); (19072 14617802 G C); (19073 14617906 A G); (19074 14618548 G C); (19075 14618692 C T); (19076
14619033 A G); (19077 14619075 C T); (19078 14620667 T G); (19079 14621897 A C); (19080 14622001
A C); (19081 14623556 T C); (19082 14623663 TAC T); (19083 14623677 C T); (19084 14623706 A
G); (19085 14623709 A G); (19086 14625976 C T); (19087 14626763 T C); (19088 14626790 G A); (19089
14627122 C T); (19090 14628134 G A); (19091 14630313 T C); (19092 14631336 C G); (19093 14631629
T C); (19094 14631774 A G); (19095 14632196 A G); (19096 14632507 T C); (19097 14632921 A
G); (19098 14633574 C T); (19099 14633653 C T); (19100 14634042 G A); (19101 14635100 T A); (19102
14635174 A G); (19103 14635693 G A); (19104 14635861 A G); (19105 14636010 A G); (19106 14636671
A C); (19107 14636751 C T); (19108 14637876 C T); (19109 14638614 G A); (19110 14640088 C T); (19111
14640206 A T); (19112 14640511 T A); (19113 14641573 A C); (19114 14642754 G A); (19115 14642758
T G); (19116 14642953 C T); (19117 14642973 A G); (19118 14645439 T A); (19119 14646081 A
G); (19120 14648267 A C); (19121 14649919 T C); (19122 14649944 A G); (19123 14650604 A G); (19124
14650949 T C); (19125 14651322 A T); (19126 14651341 G GA); (19127 14651398 C T); (19128 14652275
T A); (19129 14652470 G A); (19130 14652852 A AT); (19131 14654414 C T); (19132 14654916 A
G); (19133 14655217 C G); (19134 14656608 T C); (19135 14656855 A G); (19136 14656949 A G); (19137
14658133 C T); (19138 14659148 T A); (19139 14659358 C A); (19140 14659754 C T); (19141 14660454
G A); (19142 14661491 T C); (19143 14661761 A T); (19144 14661828 G A); (19145 14661835 A
G); (19146 14661844 C A); (19147 14661861 G A); (19148 14662360 A G); (19149 14662692 A G); (19150
14663036 T C); (19151 14663867 A T); (19152 14664302 A G); (19153 14664547 C T); (19154 14664610
C T); (19155 14665766 A C); (19156 14666641 A G); (19157 14668137 T C); (19158 14669494 T C); (19159
14669750 A G); (19160 14669883 A T); (19161 14670572 C T); (19162 14671633 C T); (19163 14671796 T
G); (19164 14671812 TCA T); (19165 14671845 C T); (19166 14671904 A G); (19167 14672391 C
A); (19168 14673605 G A); (19169 14674107 G A); (19170 14674658 T C); (19171 14674885 A G); (19172
14675473 A G); (19173 14675515 T C); (19174 14675729 C T); (19175 14675825 C T); (19176 14675872
A G); (19177 14675945 C G); (19178 14676125 C G); (19179 14677975 C A); (19180 14678910 T
G); (19181 14679479 C T); (19182 14679678 A G); (19183 14680165 G T); (19184 14680485 T
TAC); (19185 14680507 T C); (19186 14680584 T C); (19187 14681276 C A); (19188 14681732 G
A); (19189 14682023 T A); (19190 14682358 A G); (19191 14682376 C A); (19192 14683069 C T); (19193
14683072 G A); (19194 14685014 C T); (19195 14685305 T A); (19196 14685404 ACTT A); (19197
14685787 T G); (19198 14686558 G A); (19199 14686687 C G); (19200 14686830 T C); (19201 14687094
A G); (19202 14687387 T C); (19203 14688303 C T); (19204 14688515 C A); (19205 14688550 TA
T); (19206 14689261 T G); (19207 14689307 C T); (19208 14690155 C T); (19209 14690655 G
GGCTA); (19210 14691066 C T); (19211 14691328 A T); (19212 14691398 G A); (19213 14691402 A
G); (19214 14692082 T C); (19215 14692172 C T); (19216 14693558 G A); (19217 14694183 C T); (19218
14694538 T C); (19219 14694830 C A); (19220 14695585 A G); (19221 14697251 C T); (19222 14697491
A G); (19223 14697630 G A); (19224 14697653 G A); (19225 14697917 T C); (19226 14698078 C
T); (19227 14698523 C T); (19228 14698548 T G); (19229 14699380 A G); (19230 14700385 G A); (19231
14700853 G A); (19232 14700974 A G); (19233 14701379 T A); (19234 14701759 A C); (19235 14702078
T C); (19236 14702245 G A); (19237 14702810 G A); (19238 14703702 G A); (19239 14704271 G
A); (19240 14705342 T C); (19241 14705653 G A); (19242 14706580 T C); (19243 14707003 A G); (19244
14707468 C T); (19245 14708196 T G); (19246 14708366 A C); (19247 14708551 T C); (19248 14708767 T
C); (19249 14718501 T C); (19250 14718580 C T); (19251 14720106 G A); (19252 14721999 C T); (19253
14722031 C T); (19254 14722568 A G); (19255 14722970 C A); (19256 14722971 G A); (19257 14723012
C T); (19258 14723275 G A); (19259 14723276 T C); (19260 14723280 C A); (19261 14723287 G
A); (19262 14723502 G A); (19263 14723817 C T); (19264 14723853 C G); (19265 14723860 T G); (19266
14723861 G A); (19267 14723868 G A); (19268 14723929 G A); (19269 14728174 A G); (19270 14728657
G A); (19271 14728896 T G); (19272 14730387 T A); (19273 14731016 T C); (19274 14731778 G
A); (19275 14731834 G A); (19276 14732088 C T); (19277 14732221 T G); (19278 14733162 T
TGGTTGGGGTTTAGG); (19279 14734539 G A); (19280 14735086 T C); (19281 14736279 C T); (19282
14736492 A AT); (19283 14736781 A G); (19284 14737762 T A); (19285 14738081 C T); (19286 14739400
A C); (19287 14739406 G A); (19288 14740038 C T); (19289 14740197 C A); (19290 14740326 C
T); (19291 14740498 A G); (19292 14741583 T C); (19293 14744490 G A); (19294 14745087 G A); (19295
14745105 T C); (19296 14745587 A G); (19297 14746746 T C); (19298 14748522 A G); (19299 14748926
C T); (19300 14750950 G T); (19301 14751298 G T); (19302 14751753 T A); (19303 14752345 C A); (19304
14753789 G A); (19305 14754200 T C); (19306 14755222 G A); (19307 14755362 T
TGTGGCGCCAGGGGCGCCAGA); (19308 14755399 C T); (19309 14755559 A C); (19310 14755569 C
T); (19311 14755608 A G); (19312 14756512 T C); (19313 14756603 G A); (19314 14757947 A C); (19315
14757993 T C); (19316 14758200 C T); (19317 14758936 T C); (19318 14759005 C T); (19319 14759084 G
A); (19320 14759085 A C); (19321 14760139 C T); (19322 14760541 T C); (19323 14760879 C A); (19324
14761262 A G); (19325 14761832 A C); (19326 14761849 G A); (19327 14761879 A G); (19328 14763816
G A); (19329 14766039 C T); (19330 14766085 C T); (19331 14766949 T C); (19332 14767775 G C); (19333
14768406 A G); (19334 14769463 T C); (19335 14770200 A G); (19336 14770599 C T); (19337 14771251
A C); (19338 14771519 C T); (19339 14771567 T C); (19340 14771878 C T); (19341 14772001 T A); (19342
14773167 C T); (19343 14773295 C T); (19344 14774402 C T); (19345 14774691 G A); (19346 14775351
A T); (19347 14777316 C T); (19348 14778357 C T); (19349 14778365 G A); (19350 14778611 C T); (19351
14778765 T C); (19352 14778812 T C); (19353 14778900 C T); (19354 14779729 C CT); (19355 14780098
T G); (19356 14780460 C A); (19357 14780637 GTAATCGATTAT G); (19358 14780796 C T); (19359
14780862 A C); (19360 14780880 A C); (19361 14781374 C T); (19362 14781705 G C); (19363 14782001
C T); (19364 14782129 C T); (19365 14782200 T C); (19366 14782526 T G); (19367 14783329 G A); (19368
14784228 C T); (19369 14784514 T C); (19370 14784818 G A); (19371 14785057 C T); (19372 14785614
G A); (19373 14786408 G T); (19374 14786868 T A); (19375 14786908 A ACATCGATTTTT); (19376
14787424 T C); (19377 14788176 C T); (19378 14788242 C T); (19379 14788512 C T); (19380 14788555 C
T); (19381 14788741 G A); (19382 14788963 T A); (19383 14789028 T C); (19384 14789240 CA C); (19385
14789258 A G); (19386 14789845 T C); (19387 14790185 T C); (19388 14790618 G T); (19389 14791339
G A); (19390 14791659 A C); (19391 14791750 C T); (19392 14792020 C T); (19393 14792123 T
TTGTTTTC); (19394 14792531 T C); (19395 14792632 C T); (19396 14792871 C A); (19397 14792905 G
A); (19398 14794481 A G); (19399 14794901 G T); (19400 14795042 T C); (19401 14795831 G A); (19402
14796602 T C); (19403 14797484 G A); (19404 14797939 G A); (19405 14798087 A C); (19406 14798132
A G); (19407 14798560 T G); (19408 14798739 A T); (19409 14799067 C T); (19410 14800439 A
T); (19411 14800868 G A); (19412 14800901 G A); (19413 14801292 C T); (19414 14801815 A G); (19415
14801955 C T); (19416 14802976 A G); (19417 14804032 T C); (19418 14804148 G A); (19419 14804153
C T); (19420 14805466 G GA); (19421 14805666 C A); (19422 14806137 AAT A); (19423 14807586 T
C); (19424 14807662 G C); (19425 14808097 A T); (19426 14808655 G A); (19427 14810503 T A); (19428
14810534 G A); (19429 14811014 G A); (19430 14811211 A AT); (19431 14811284 A G); (19432
14811499 G A); (19433 14811500 G A); (19434 14812620 T G); (19435 14813023 A C); (19436 14813617
T C); (19437 14814064 C T); (19438 14814596 C A); (19439 14814703 G A); (19440 14815698 G
A); (19441 14816466 G A); (19442 14816558 T C); (19443 14816613 G A); (19444 14816638 T C); (19445
14816665 G T); (19446 14816886 T C); (19447 14817005 A G); (19448 14817104 G A); (19449 14817361
T G); (19450 14818913 G T); (19451 14818973 C T); (19452 14819151 C T); (19453 14819854 T C); (19454
14820038 T C); (19455 14820643 C A); (19456 14821143 T C); (19457 14821230 A C); (19458 14822547 T
C); (19459 14823575 C CT); (19460 14823689 T C); (19461 14823959 A C); (19462 14825865 C
CT); (19463 14826845 TA T); (19464 14827233 G T); (19465 14827623 G A); (19466 14828761 A
AT); (19467 14829132 T C); (19468 14829334 C A); (19469 14829405 T C); (19470 14831024 G A); (19471
14831082 C T); (19472 14831531 T C); (19473 14831746 AT A); (19474 14833490 G A); (19475 14834166
CA C); (19476 14834581 C T); (19477 14834666 G A); (19478 14834850 C T); (19479 14835808 T
C); (19480 14836855 G A); (19481 14837199 T G); (19482 14837401 G T); (19483 14837882 A G); (19484
14838210 C T); (19485 14839180 G A); (19486 14839739 A C); (19487 14840119 G A); (19488 14842590
G A); (19489 14842842 C T); (19490 14842866 C T); (19491 14843452 A T); (19492 14843525 C T); (19493
14843891 G A); (19494 14844250 A T); (19495 14844540 G GT); (19496 14844675 A C); (19497
14845222 AT A); (19498 14845400 C T); (19499 14846462 G T); (19500 14846557 C T); (19501 14847073
C G); (19502 14847126 A G); (19503 14848331 T C); (19504 14848358 T A); (19505 14849053 C
T); (19506 14849186 T C); (19507 14849422 G A); (19508 14851301 G C); (19509 14852619 G T); (19510
14852891 G T); (19511 14854618 T C); (19512 14855719 A T); (19513 14856103 AT A); (19514 14856990
ATTT A); (19515 14857573 A G); (19516 14857647 A C); (19517 14857768 G A); (19518 14857784 A
G); (19519 14857809 A G); (19520 14858830 A G); (19521 14858928 T G); (19522 14859525 G A); (19523
14859641 C T); (19524 14859713 T TGCCCCAAGCGTGGGTTCCCAC); (19525 14860140 G A); (19526
14860580 G A); (19527 14860748 C T); (19528 14860917 A G); (19529 14860932 A G); (19530 14861468
C T); (19531 14862359 C T); (19532 14862467 G A); (19533 14862823 A T); (19534 14862956 T G); (19535
14863021 C T); (19536 14863368 C T); (19537 14864653 AT A); (19538 14864844 G C); (19539 14864994
G A); (19540 14865424 A G); (19541 14865437 A C); (19542 14865974 A T); (19543 14866167 G
A); (19544 14866584 C T); (19545 14868188 C T); (19546 14868367 C T); (19547 14869229 A C); (19548
14870003 A C); (19549 14871834 C T); (19550 14874279 T C); (19551 14874539 C T); (19552 14875536 T
C); (19553 14875906 A G); (19554 14875925 C A); (19555 14876284 G A); (19556 14876438 AG
A); (19557 14876858 A G); (19558 14877078 A T); (19559 14877307 C T); (19560 14877344 A G); (19561
14877443 A C); (19562 14878301 A G); (19563 14878371 TA T); (19564 14878814 T G); (19565 14878950
G GA); (19566 14881915 A T); (19567 14886646 C A); (19568 14886800 T C); (19569 14888046 C
T); (19570 14888561 T C); (19571 14889047 T C); (19572 14889831 G A); (19573 14890310 TTATATA
T); (19574 14890322 T C); (19575 14890592 A AC); (19576 14890853 T C); (19577 14890870
TGTCTATCATTATTA T); (19578 14890936 A G); (19579 14892045 C T); (19580 14892309 G C); (19581
14892499 T C); (19582 14893304 G C); (19583 14895139 G A); (19584 14895656 C T); (19585 14896156
T C); (19586 14896265 A G); (19587 14896467 G A); (19588 14896619 G C); (19589 14897455 A
G); (19590 14897525 A G); (19591 14897592 TTA T); (19592 14898335 T A); (19593 14898398 C
T); (19594 14898667 A T); (19595 14898958 A AT); (19596 14899004 T C); (19597 14899198 T C); (19598
14899511 G A); (19599 14899642 C T); (19600 14900016 C T); (19601 14900359 G A); (19602 14900371
G GT); (19603 14901855 G C); (19604 14902549 G A); (19605 14903228 C T); (19606 14903513 G
A); (19607 14904602 C T); (19608 14906341 C T); (19609 14906359 C T); (19610 14906470 G A); (19611
14906815 C T); (19612 14907423 C T); (19613 14909018 G A); (19614 14909309 G A); (19615 14909668
C T); (19616 14909920 G A); (19617 14910402 A AT); (19618 14910590 A AT); (19619 14910732 G
A); (19620 14911042 G A); (19621 14911384 T C); (19622 14911388 C T); (19623 14911825 C T); (19624
14912699 G T); (19625 14913277 A G); (19626 14913442 G A); (19627 14913741 C G); (19628 14914486
A G); (19629 14914564 T C); (19630 14914609 T C); (19631 14914876 C T); (19632 14915004 C A); (19633
14915133 A T); (19634 14915191 C T); (19635 14915606 C A); (19636 14916004 A G); (19637 14916339
A G); (19638 14916401 T A); (19639 14916699 A G); (19640 14917001 G A); (19641 14917369 A
G); (19642 14917433 C A); (19643 14918604 C T); (19644 14918657 C T); (19645 14919578 C T); (19646
14919596 G A); (19647 14921022 G C); (19648 14921582 G A); (19649 14921670 A G); (19650 14921885
T C); (19651 14921908 G A); (19652 14926626 G A); (19653 14927468 G A); (19654 14927626 T
C); (19655 14928317 C CT); (19656 14929646 C A); (19657 14929968 G A); (19658 14930530 T G); (19659
14931604 C CACAT); (19660 14933941 G A); (19661 14934120 G A); (19662 14934174 T C); (19663
14934878 C T); (19664 14934902 A G); (19665 14934915 G A); (19666 14934921 C T); (19667 14935161
T A); (19668 14935210 A G); (19669 14937426 T C); (19670 14938035 C T); (19671 14939023 C T); (19672
14939603 C T); (19673 14939622 A G); (19674 14939730 C T); (19675 14939976 A G); (19676 14941145
A G); (19677 14942472 T C); (19678 14942578 G A); (19679 14942719 G A); (19680 14944416 A
AT); (19681 14944853 C T); (19682 14945406 T C); (19683 14946046 T C); (19684 14946518 C T); (19685
14946540 C T); (19686 14946989 C CA); (19687 14947465 G A); (19688 14947512 A C); (19689 14947558
C T); (19690 14947606 T C); (19691 14947748 C T); (19692 14947757 T C); (19693 14947825 A G); (19694
14948348 T C); (19695 14949503 G A); (19696 14949733 C CAAG); (19697 14949853 T C); (19698
14949925 C T); (19699 14950192 T C); (19700 14950505 C A); (19701 14950996 C A); (19702 14951073
A G); (19703 14951183 C T); (19704 14951303 C T); (19705 14951473 T G); (19706 14952381 A
G); (19707 14952687 A G); (19708 14952926 A G); (19709 14953172 T G); (19710 14953510 C T); (19711
14953586 C T); (19712 14953794 CT C); (19713 14955579 C A); (19714 14956423 C T); (19715 14957294
G C); (19716 14957984 G A); (19717 14958397 A T); (19718 14958626 G T); (19719 14962131 A
G); (19720 14962640 T C); (19721 14962946 G A); (19722 14963196 A G); (19723 14963376 C T); (19724
14963428 T A); (19725 14963447 C T); (19726 14964045 T A); (19727 14964198 A G); (19728 14965031
C A); (19729 14965086 C T); (19730 14965442 G A); (19731 14965614 C T); (19732 14965826 G
A); (19733 14965885 C T); (19734 14967873 G T); (19735 14967940 C G); (19736 14968510 G A); (19737
14968538 G A); (19738 14968602 C T); (19739 14971600 T G); (19740 14971684 G T); (19741 14971906
A C); (19742 14972596 C T); (19743 14973738 G A); (19744 14974051 A G); (19745 14975830 G
A); (19746 14975957 T A); (19747 14976084 C T); (19748 14976105 G A); (19749 14976449 G A); (19750
14976659 C T); (19751 14977179 G A); (19752 14978161 G A); (19753 14979434 T C); (19754 14980205
A G); (19755 14980279 G C); (19756 14982473 A G); (19757 14982603 A C); (19758 14983418 A
G); (19759 14983951 C T); (19760 14984430 C T); (19761 14984488 G A); (19762 14984774 C A); (19763
14984808 C T); (19764 14985241 C A); (19765 14985344 G A); (19766 14986461 C T); (19767 14986514
C A); (19768 14986702 T C); (19769 14986735 G A); (19770 14986873 C T); (19771 14987132 A
C); (19772 14987271 T C); (19773 14987435 C T); (19774 14987466 G A); (19775 14988457 A G); (19776
14988491 T C); (19777 14988516 C T); (19778 14988535 T C); (19779 14988558 T A); (19780 14988879 G
A); (19781 14989591 G A); (19782 14990065 G A); (19783 14990253 A G); (19784 14992304 C A); (19785
14992662 G T); (19786 14993729 A G); (19787 14995600 C CA); (19788 14995964 G GTTAA); (19789
14996330 T C); (19790 14996332 A T); (19791 14996334 A T); (19792 14996878 G A); (19793 14996879
A C); (19794 14998432 C T); (19795 14998962 A G); (19796 14999940 G T); (19797 15001621 A
G); (19798 15002201 C G); (19799 15002243 G A); (19800 15002650 C T); (19801 15003262 C T); (19802
15003639 C T); (19803 15003967 G T); (19804 15005199 T C); (19805 15005432 G A); (19806 15005641
T C); (19807 15006169 T A); (19808 15006181 T A); (19809 15006199 C A); (19810 15006311 G
A); (19811 15006704 T G); (19812 15007200 C T); (19813 15007252 A G); (19814 15009388 C T); (19815
15009402 C T); (19816 15009417 T G); (19817 15009612 A T); (19818 15009756 A G); (19819 15010406
A AT); (19820 15011991 G T); (19821 15012788 A G); (19822 15012870 A G); (19823 15013932 G
A); (19824 15014389 T C); (19825 15014835 A G); (19826 15016095 G A); (19827 15016102 G A); (19828
15016126 T A); (19829 15016135 C T); (19830 15016144 T A); (19831 15016186 G A); (19832 15016246
G A); (19833 15016255 C T); (19834 15016377 C T); (19835 15016399 G A); (19836 15016409 C
T); (19837 15016432 C T); (19838 15016437 A G); (19839 15016443 A C); (19840 15016449 T C); (19841
15016477 C T); (19842 15016479 T G); (19843 15016528 A C); (19844 15016529 G T); (19845 15016531
C A); (19846 15016596 C T); (19847 15016931 G A); (19848 15017405 T G); (19849 15017632 G
A); (19850 15017971 G T); (19851 15018150 C T); (19852 15018177 C A); (19853 15018403 T C); (19854
15018408 C T); (19855 15018639 T C); (19856 15018646 C T); (19857 15019221 A G); (19858 15019965 T
A); (19859 15022502 G A); (19860 15024029 A T); (19861 15024608 C T); (19862 15025706 A G); (19863
15025967 T C); (19864 15026088 C T); (19865 15026306 G A); (19866 15026948 T C); (19867 15027220
G A); (19868 15031415 GT G); (19869 15034054 G A); (19870 15034072 A G); (19871 15034114 A
C); (19872 15034172 C T); (19873 15034207 G A); (19874 15034217 T C); (19875 15034288 T C); (19876
15034303 T A); (19877 15035134 G T); (19878 15035139 A G); (19879 15035164 C A); (19880 15035202
C T); (19881 15035698 C T); (19882 15035713 C A); (19883 15035722 T C); (19884 15036688 G A); (19885
15039398 A T); (19886 15039401 T A); (19887 15039475 T C); (19888 15043983 GT G); (19889 15045152
A G); (19890 15045161 C T); (19891 15045260 G A); (19892 15045265 A G); (19893 15045307 T
C); (19894 15045335 T C); (19895 15045347 T C); (19896 15045373 C A); (19897 15045375 A G); (19898
15045380 AG A); (19899 15046619 G A); (19900 15046679 A C); (19901 15046737 C T); (19902
15046772 G A); (19903 15046782 T C); (19904 15046789 A C); (19905 15047185 A G); (19906 15047219
A G); (19907 15047281 G A); (19908 15047288 A T); (19909 15047423 C T); (19910 15047483 C
T); (19911 15047504 A G); (19912 15049145 T A); (19913 15051595 A G); (19914 15053892 A G); (19915
15054550 A G); (19916 15055239 T C); (19917 15055788 G A); (19918 15055891 T C); (19919 15056020
A G); (19920 15057264 G T); (19921 15057625 C T); (19922 15057635 T C); (19923 15057713 G
C); (19924 15057799 A T); (19925 15059126 C T); (19926 15059292 C T); (19927 15059342 T C); (19928
15059364 G A); (19929 15059959 A C); (19930 15060038 T C); (19931 15060307 C A); (19932 15060818
T A); (19933 15061855 G T); (19934 15061924 T A); (19935 15061925 T C); (19936 15062864 G
A); (19937 15063620 C T); (19938 15063663 A C); (19939 15063896 G A); (19940 15064174 G A); (19941
15065101 A G); (19942 15065126 A T); (19943 15066288 A G); (19944 15066745 T TA); (19945
15067303 A G); (19946 15068936 C T); (19947 15069116 G A); (19948 15069316 T C); (19949 15069624
T G); (19950 15070244 G T); (19951 15071826 T A); (19952 15071872 T C); (19953 15073892 A C); (19954
15074726 C A); (19955 15075205 A C); (19956 15076549 T C); (19957 15076859 T C); (19958 15077070 C
A); (19959 15077432 G T); (19960 15077500 G A); (19961 15078176 G A); (19962 15078508 C T); (19963
15079615 C T); (19964 15080102 A C); (19965 15080186 A T); (19966 15080224 TAA T); (19967
15080527 A G); (19968 15080786 A G); (19969 15080809 T C); (19970 15081267 A T); (19971 15081728
A G); (19972 15081963 G A); (19973 15081970 AC A); (19974 15082200 A C); (19975 15083027 A
AC); (19976 15083088 A AT); (19977 15083524 A T); (19978 15085975 C T); (19979 15086507 T
C); (19980 15086858 C A); (19981 15087900 G A); (19982 15088359 T G); (19983 15088506 A G); (19984
15088596 A G); (19985 15089396 C T); (19986 15089398 C T); (19987 15089441 T C); (19988 15089710
G A); (19989 15090581 C T); (19990 15090904 G A); (19991 15092037 G T); (19992 15092322 G
T); (19993 15092983 A G); (19994 15093509 A G); (19995 15094314 G T); (19996 15095113 CATTTGT
C); (19997 15095991 T G); (19998 15096178 T C); (19999 15096557 T C); (20000 15097680 G A); (20001
15097786 G T); (20002 15097877 C G); (20003 15098083 T C); (20004 15099154 A C); (20005 15099226
T C); (20006 15099380 A G); (20007 15099456 G A); (20008 15100057 T TA); (20009 15100094 G
A); (20010 15100137 A G); (20011 15100861 T C); (20012 15101154 T C); (20013 15101613 C T); (20014
15102160 G A); (20015 15102806 A G); (20016 15102897 C T); (20017 15103094 G A); (20018 15103646
A G); (20019 15103776 A C); (20020 15104027 A G); (20021 15104071 G A); (20022 15104381 A
G); (20023 15104983 C T); (20024 15105008 G T); (20025 15105548 C T); (20026 15105838 C T); (20027
15106075 A C); (20028 15106102 A G); (20029 15107303 T A); (20030 15109162 G A); (20031 15109300
C G); (20032 15109463 G A); (20033 15111027 C G); (20034 15111615 C T); (20035 15113739 A
G); (20036 15113874 G A); (20037 15114536 T C); (20038 15114569 G A); (20039 15115764 C T); (20040
15117235 T C); (20041 15117261 G A); (20042 15117334 G A); (20043 15117509 A T); (20044 15118533
G T); (20045 15118761 G A); (20046 15119075 T A); (20047 15119409 T C); (20048 15119759 A
C); (20049 15120091 T G); (20050 15121066 C G); (20051 15121226 A AC); (20052 15121940 C T); (20053
15123858 C T); (20054 15124220 G A); (20055 15124699 C T); (20056 15124885 G A); (20057 15125052
G A); (20058 15125344 C T); (20059 15127321 A G); (20060 15127334 C A); (20061 15127347 C
G); (20062 15127478 C T); (20063 15127785 A G); (20064 15127911 T C); (20065 15129060 G A); (20066
15129395 T TTTTCAATTGTA); (20067 15129575 C T); (20068 15131105 G A); (20069 15131230 C
T); (20070 15131553 G A); (20071 15131865 G A); (20072 15131884 G C); (20073 15132392 G C); (20074
15132499 G A); (20075 15132900 A G); (20076 15132981 T C); (20077 15133016 C T); (20078 15133139
C T); (20079 15133148 C T); (20080 15133296 G A); (20081 15134032 A G); (20082 15134182 C
T); (20083 15135281 T C); (20084 15136975 T C); (20085 15138316 C T); (20086 15139428 A G); (20087
15141046 C G); (20088 15142030 G T); (20089 15142691 C A); (20090 15142736 G A); (20091 15143566
G A); (20092 15144031 G A); (20093 15144377 C T); (20094 15144476 C T); (20095 15144601 G
A); (20096 15144710 A G); (20097 15144768 T A); (20098 15144794 G A); (20099 15145836 G A); (20100
15146267 A G); (20101 15146537 T C); (20102 15147009 A ACT); (20103 15148385 T A); (20104
15149281 T C); (20105 15150305 G T); (20106 15150701 C T); (20107 15150872 C T); (20108 15151379
G A); (20109 15151498 G A); (20110 15151509 T C); (20111 15151748 A G); (20112 15152586 T
C); (20113 15152847 G A); (20114 15153064 A G); (20115 15155379 A G); (20116 15155896 C T); (20117
15155898 A T); (20118 15156090 C G); (20119 15156775 G A); (20120 15157368 C T); (20121 15157427
A G); (20122 15158212 C G); (20123 15158461 A G); (20124 15160204 A G); (20125 15160478 C
T); (20126 15160518 G A); (20127 15160738 G A); (20128 15160817 C T); (20129 15161117 G A); (20130
15161121 A T); (20131 15161123 A ATT); (20132 15161752 C T); (20133 15162020 A T); (20134
15164845 G A); (20135 15165012 G A); (20136 15165121 A G); (20137 15165481 C T); (20138 15166157
T C); (20139 15166183 A AT); (20140 15166293 G A); (20141 15169096 C T); (20142 15169670 A
AT); (20143 15169874 T TG); (20144 15170252 C G); (20145 15170254 T C); (20146 15170758 CA
C); (20147 15170898 C T); (20148 15171016 A G); (20149 15171050 A T); (20150 15171688 T C); (20151
15172109 G A); (20152 15175058 G A); (20153 15175103 C A); (20154 15175550 T G); (20155 15175610
C T); (20156 15175707 A G); (20157 15176290 C T); (20158 15176855 G A); (20159 15177054 TAATG
T); (20160 15177708 T G); (20161 15177748 T TA); (20162 15177910 G A); (20163 15177997 C T); (20164
15178411 C T); (20165 15178951 G A); (20166 15178961 C T); (20167 15180686 C A); (20168 15180913
C T); (20169 15181302 A G); (20170 15181692 G A); (20171 15181711 G C); (20172 15181964 C
T); (20173 15182618 A G); (20174 15182948 A T); (20175 15183086 G A); (20176 15183237 C T); (20177
15183436 G A); (20178 15183649 C T); (20179 15183693 A G); (20180 15183710 A T); (20181 15184016
G A); (20182 15184365 T C); (20183 15184810 C T); (20184 15185945 G A); (20185 15186000 T
G); (20186 15186388 T C); (20187 15186435 G A); (20188 15186460 G A); (20189 15186731 C G); (20190
15186894 T C); (20191 15186955 C T); (20192 15188008 A C); (20193 15188383 G A); (20194 15188928
C T); (20195 15188976 T C); (20196 15189793 G A); (20197 15190106 G A); (20198 15190875 A
G); (20199 15190992 G A); (20200 15191984 C T); (20201 15192495 G T); (20202 15193576 G A); (20203
15194883 C T); (20204 15194915 AT A); (20205 15194995 C A); (20206 15195410 A G); (20207 15195663
G A); (20208 15195973 C A); (20209 15196016 A G); (20210 15196090 G A); (20211 15196157 C
T); (20212 15196194 C T); (20213 15196285 G C); (20214 15196504 G A); (20215 15196526 C A); (20216
15196710 T C); (20217 15197242 C T); (20218 15197556 G T); (20219 15197720 G A); (20220 15198033
G A); (20221 15199095 A T); (20222 15199228 A G); (20223 15202345 C T); (20224 15204800 T
A); (20225 15206325 A G); (20226 15206890 G A); (20227 15207410 C A); (20228 15207448 G A); (20229
15207941 A G); (20230 15208424 G A); (20231 15208513 A C); (20232 15209813 AGG A); (20233
15210093 CT C); (20234 15210231 GA G); (20235 15210286 A AAAGTTTTAT); (20236 15210762 A
G); (20237 15211465 A G); (20238 15212929 G A); (20239 15212950 A G); (20240 15213332 A C); (20241
15213523 A G); (20242 15213528 A G); (20243 15214037 C G); (20244 15214154 A G); (20245 15214544
C T); (20246 15216136 G A); (20247 15216446 T G); (20248 15216476 G A); (20249 15216705 A
C); (20250 15218194 G A); (20251 15218934 T C); (20252 15219834 G A); (20253 15220102 C T); (20254
15220294 A G); (20255 15222058 T G); (20256 15223752 G A); (20257 15223757 G T); (20258 15223943
A G); (20259 15224000 T C); (20260 15224434 A T); (20261 15225213 C A); (20262 15225264 T C); (20263
15225784 A T); (20264 15225953 T C); (20265 15226081 T C); (20266 15227885 C A); (20267 15228070 C
T); (20268 15230546 T C); (20269 15231666 T G); (20270 15231998 G T); (20271 15234279 C T); (20272
15235082 C T); (20273 15235219 A T); (20274 15238307 TTTAATAAG T); (20275 15238322 G A); (20276
15238812 G A); (20277 15239909 C G); (20278 15240163 C CA); (20279 15241867 CAAAATATG
C); (20280 15244483 T A); (20281 15246416 C T); (20282 15246628 C G); (20283 15247706 T C); (20284
15247886 A G); (20285 15247935 T A); (20286 15248086 T C); (20287 15248260 C T); (20288 15248332
G T); (20289 15249139 T C); (20290 15250032 A G); (20291 15252143 G A); (20292 15252838 A
G); (20293 15256093 G A); (20294 15256530 T C); (20295 15256689 C T); (20296 15256758 T TC); (20297
15257309 C T); (20298 15257554 TC T); (20299 15257679 G A); (20300 15258176 A G); (20301 15258860
A G); (20302 15259319 T C); (20303 15260033 AT A); (20304 15260430 T TA); (20305 15261098 A
G); (20306 15261222 C T); (20307 15261536 T C); (20308 15261746 G C); (20309 15262907 G A); (20310
15263053 C A); (20311 15264656 A T); (20312 15265033 A C); (20313 15265868 GAAGCGGAGCA
G); (20314 15266292 C T); (20315 15266708 A C); (20316 15266813 C T); (20317 15266818 T C); (20318
15266945 C T); (20319 15266947 C T); (20320 15267112 T G); (20321 15267186 A G); (20322 15267414
C T); (20323 15267728 C T); (20324 15267733 C T); (20325 15267762 A G); (20326 15267784 C T); (20327
15267842 T C); (20328 15267843 G A); (20329 15268132 T G); (20330 15269359 G A); (20331 15270039
T G); (20332 15271822 T TACCTCCG); (20333 15271864 T C); (20334 15271909 G A); (20335 15271912 T
G); (20336 15272013 C A); (20337 15272284 G A); (20338 15273073 T TTATA); (20339 15274071 A
G); (20340 15274403 A C); (20341 15274688 T C); (20342 15275483 G A); (20343 15275611 T C); (20344
15275661 G A); (20345 15276054 G A); (20346 15276547 T C); (20347 15276848 A G); (20348 15276854
A G); (20349 15276855 T C); (20350 15276890 G A); (20351 15276945 C T); (20352 15277234 A
G); (20353 15277452 A C); (20354 15277642 AC A); (20355 15277746 G T); (20356 15278216 T C); (20357
15278341 A G); (20358 15278500 G A); (20359 15278642 T C); (20360 15278797 C T); (20361 15278982
A C); (20362 15279125 T C); (20363 15279383 C A); (20364 15279758 G A); (20365 15279872 C
T); (20366 15280088 C T); (20367 15281153 C A); (20368 15281231 T C); (20369 15281382 A G); (20370
15281525 C A); (20371 15281971 G A); (20372 15282028 A G); (20373 15282098 A G); (20374 15282305
T C); (20375 15283280 C T); (20376 15283493 C T); (20377 15283803 T G); (20378 15284806 T
TA); (20379 15285082 T C); (20380 15285957 C T); (20381 15286080 T C); (20382 15286192 G A); (20383
15286414 G T); (20384 15286513 C T); (20385 15287274 C T); (20386 15287526 A C); (20387 15287604
A G); (20388 15288009 T G); (20389 15288467 AC A); (20390 15289052 C T); (20391 15289180 C
G); (20392 15289192 G A); (20393 15289295 A T); (20394 15290432 C T); (20395 15291570 C T); (20396
15291880 AT A); (20397 15292867 G A); (20398 15293994 G A); (20399 15294152 T C); (20400
15295633 T C); (20401 15296328 C A); (20402 15298296 G A); (20403 15298858 A G); (20404 15299041
A C); (20405 15299349 AT A); (20406 15299656 T C); (20407 15300897 T G); (20408 15301305 C
T); (20409 15301583 G A); (20410 15301595 C T); (20411 15301633 C T); (20412 15302283 A G); (20413
15302633 C T); (20414 15302834 G A); (20415 15303946 G A); (20416 15304074 G A); (20417 15304262
T C); (20418 15306230 C T); (20419 15306266 C T); (20420 15306386 T C); (20421 15306931 A T); (20422
15307548 A G); (20423 15307610 G A); (20424 15307661 C G); (20425 15307915 T A); (20426 15307989
G C); (20427 15308097 G A); (20428 15308669 C T); (20429 15309260 C T); (20430 15309470 G
A); (20431 15309607 G A); (20432 15310040 C T); (20433 15310059 G A); (20434 15310576 T C); (20435
15311328 G A); (20436 15311621 A G); (20437 15312100 G A); (20438 15312493 C T); (20439 15312608
C T); (20440 15312696 T C); (20441 15312725 G T); (20442 15312898 C T); (20443 15312901 A G); (20444
15313360 G C); (20445 15314115 T C); (20446 15314226 C T); (20447 15314398 C T); (20448 15314757 A
G); (20449 15315250 T G); (20450 15315371 ATAAATACAAGGCC A); (20451 15315455 T C); (20452
15315501 C T); (20453 15316128 C A); (20454 15316616 T G); (20455 15317016 G A); (20456 15317204
G A); (20457 15317348 G A); (20458 15317567 C T); (20459 15317609 G A); (20460 15317646 G
T); (20461 15317648 T C); (20462 15318066 T C); (20463 15318110 G A); (20464 15318266 A G); (20465
15318337 C T); (20466 15318421 T C); (20467 15319030 C T); (20468 15319060 T C); (20469 15319350 T
C); (20470 15319489 T C); (20471 15319603 A G); (20472 15319615 G A); (20473 15319623 T C); (20474
15320825 G A); (20475 15321307 C T); (20476 15321963 G A); (20477 15322206 G A); (20478 15322272
G A); (20479 15322935 G T); (20480 15322970 A T); (20481 15324413 A C); (20482 15324621 TA
T); (20483 15325007 T G); (20484 15325513 G A); (20485 15326068 G A); (20486 15328211 C T); (20487
15328408 A G); (20488 15328448 G T); (20489 15328573 T C); (20490 15332271 A G); (20491 15335054
A C); (20492 15335295 A G); (20493 15335328 G A); (20494 15336162 T C); (20495 15336219 T
C); (20496 15336348 G A); (20497 15337063 G T); (20498 15337437 G A); (20499 15337467 C T); (20500
15337486 C T); (20501 15337541 A G); (20502 15337841 A C); (20503 15338051 G A); (20504 15340044
G A); (20505 15340365 G T); (20506 15341236 G A); (20507 15341282 C T); (20508 15341923 A
C); (20509 15341924 A G); (20510 15342289 A G); (20511 15342563 C T); (20512 15342764 C T); (20513
15342937 C A); (20514 15343305 C G); (20515 15343344 G C); (20516 15343635 G A); (20517 15343793
G C); (20518 15343890 G A); (20519 15343994 G A); (20520 15344022 C T); (20521 15344032 G
A); (20522 15344154 T C); (20523 15345103 C T); (20524 15345517 A G); (20525 15345637 G A); (20526
15345641 C T); (20527 15345749 G A); (20528 15345751 T C); (20529 15345876 C T); (20530 15346058
G A); (20531 15346406 C A); (20532 15346589 A G); (20533 15347257 C T); (20534 15347593 C
T); (20535 15348643 A G); (20536 15348713 A G); (20537 15349058 A G); (20538 15349157 G T); (20539
15349465 A C); (20540 15349796 G T); (20541 15350207 A C); (20542 15351927 T A); (20543 15352385
A G); (20544 15352471 G A); (20545 15352885 A G); (20546 15353490 T A); (20547 15353882 T
C); (20548 15354018 C A); (20549 15354038 C A); (20550 15354141 G A); (20551 15354355 T A); (20552
15354786 C CT); (20553 15355173 T C); (20554 15355194 G A); (20555 15355702 G A); (20556 15356116
C T); (20557 15356198 T A); (20558 15356678 C A); (20559 15356961 C A); (20560 15358377 C T); (20561
15358868 T C); (20562 15359370 G A); (20563 15359521 C T); (20564 15360639 C CT); (20565 15360668
T G); (20566 15360717 T C); (20567 15360926 A AT); (20568 15361039 G A); (20569 15361791 T
G); (20570 15361928 A G); (20571 15361994 A G); (20572 15362208 C T); (20573 15362444 A G); (20574
15362570 C T); (20575 15362632 A C); (20576 15363143 A C); (20577 15363148 C A); (20578 15363704
T C); (20579 15364163 A G); (20580 15364395 G A); (20581 15364804 T C); (20582 15368742 C
T); (20583 15369113 G A); (20584 15375069 G A); (20585 15375210 C G); (20586 15375544 C T); (20587
15376245 C T); (20588 15376305 T C); (20589 15376490 G A); (20590 15376803 A G); (20591 15377731
A C); (20592 15378113 T A); (20593 15378334 C T); (20594 15379075 A G); (20595 15379392 C
A); (20596 15379453 G T); (20597 15379454 T C); (20598 15379589 G A); (20599 15379930 G A); (20600
15379953 C T); (20601 15380014 A G); (20602 15380125 G T); (20603 15380645 C T); (20604 15381046
G A); (20605 15381072 G A); (20606 15381645 C T); (20607 15381683 C T); (20608 15381698 T
C); (20609 15381997 G A); (20610 15382004 C T); (20611 15382305 CT C); (20612 15382463 A G); (20613
15382537 T C); (20614 15382979 C T); (20615 15383017 C T); (20616 15383041 C T); (20617 15383527 T
C); (20618 15384278 A G); (20619 15384615 A T); (20620 15384700 T C); (20621 15384728 AC A); (20622
15384926 C T); (20623 15385596 G A); (20624 15386066 T C); (20625 15386666 T TA); (20626 15387032
A T); (20627 15387064 G C); (20628 15387138 T C); (20629 15388195 G T); (20630 15388435 C
G); (20631 15389405 G GAC); (20632 15389985 G A); (20633 15390136 A G); (20634 15390335 C
T); (20635 15390861 G T); (20636 15390884 C G); (20637 15392067 C T); (20638 15393146 C A); (20639
15393463 G A); (20640 15394632 G A); (20641 15394911 C T); (20642 15395702 C T); (20643 15397003
A G); (20644 15397108 C T); (20645 15397380 C T); (20646 15398214 A G); (20647 15398243 C
T); (20648 15398410 G T); (20649 15398609 A G); (20650 15398623 C A); (20651 15398877 G A); (20652
15399391 C T); (20653 15400359 C T); (20654 15400369 C T); (20655 15400590 C T); (20656 15400635 T
C); (20657 15401425 C T); (20658 15401515 T C); (20659 15401667 A G); (20660 15401914 T C); (20661
15401964 C T); (20662 15402066 C T); (20663 15402227 G C); (20664 15403104 C T); (20665 15403407 T
C); (20666 15403453 A G); (20667 15403485 A G); (20668 15403500 C T); (20669 15404406 G C); (20670
15404710 C T); (20671 15405155 G A); (20672 15406982 G T); (20673 15407069 C T); (20674 15407219
G A); (20675 15407220 A G); (20676 15407304 A ATG); (20677 15409179 C T); (20678 15409186 T
C); (20679 15409743 G A); (20680 15409774 A G); (20681 15411386 A C); (20682 15411746 G A); (20683
15411801 A G); (20684 15411924 C T); (20685 15411928 G A); (20686 15411994 G A); (20687 15412824
T C); (20688 15413467 C T); (20689 15415804 C T); (20690 15416166 A T); (20691 15417211 T A); (20692
15418075 G A); (20693 15419032 T G); (20694 15420338 T A); (20695 15420831 A G); (20696 15420954
A C); (20697 15421484 G A); (20698 15421762 A G); (20699 15423294 G C); (20700 15424109 C
T); (20701 15424393 G A); (20702 15424749 G A); (20703 15426160 C T); (20704 15426180 G T); (20705
15426186 C T); (20706 15426436 T C); (20707 15426797 A G); (20708 15426897 C A); (20709 15426969
C T); (20710 15427061 T C); (20711 15427189 A G); (20712 15427483 G A); (20713 15427484 A
T); (20714 15428319 T C); (20715 15428548 C A); (20716 15430558 C T); (20717 15430697 T C); (20718
15431360 A G); (20719 15431762 A T); (20720 15432483 G A); (20721 15433994 G A); (20722 15433996
T C); (20723 15434295 C T); (20724 15434399 C T); (20725 15435005 T C); (20726 15435412 G A); (20727
15435825 A T); (20728 15435948 A T); (20729 15438885 A AGAAACT); (20730 15439263 C T); (20731
15440289 GT G); (20732 15440347 G GAAAAATCGTCATCGTATGTT); (20733 15440515 A G); (20734
15440664 C CTA); (20735 15440703 C A); (20736 15441665 G A); (20737 15442413 C T); (20738
15443525 A G); (20739 15444121 C T); (20740 15444123 G T); (20741 15444135 T A); (20742 15444152
G T); (20743 15444542 C T); (20744 15444636 T C); (20745 15444781 C T); (20746 15444866 C T); (20747
15444916 C T); (20748 15444944 T C); (20749 15445034 G T); (20750 15445070 C G); (20751 15445310
A G); (20752 15445634 G A); (20753 15445943 G A); (20754 15446296 T A); (20755 15446343 C
T); (20756 15446348 T C); (20757 15447229 C A); (20758 15447473 C T); (20759 15447521 C T); (20760
15447612 G A); (20761 15447885 C T); (20762 15447936 C T); (20763 15448025 T C); (20764 15448170 C
A); (20765 15448792 A G); (20766 15449005 C T); (20767 15449098 A C); (20768 15449304 G A); (20769
15450019 G A); (20770 15450044 G A); (20771 15450177 A G); (20772 15450218 TCTTTA T); (20773
15450900 A G); (20774 15451613 A G); (20775 15452742 G A); (20776 15452804 A G); (20777 15452806
C T); (20778 15453241 T C); (20779 15453243 G T); (20780 15453247 A G); (20781 15453374 A
AT); (20782 15454242 G A); (20783 15454631 A C); (20784 15454639 T C); (20785 15455346 T C); (20786
15456472 G A); (20787 15456526 A G); (20788 15457342 T C); (20789 15457436 GTT G); (20790
15457647 G A); (20791 15457856 C A); (20792 15458408 A G); (20793 15458689 T C); (20794 15458929
A G); (20795 15459579 T A); (20796 15459727 C T); (20797 15459860 C A); (20798 15460320 C T); (20799
15460343 C T); (20800 15460672 G A); (20801 15464084 GT G); (20802 15464143 T C); (20803 15464163
C T); (20804 15464164 A G); (20805 15464165 G A); (20806 15464166 A G); (20807 15472856 T
C); (20808 15474384 C T); (20809 15474562 A C); (20810 15474794 C A); (20811 15476789 C A); (20812
15477201 A C); (20813 15477468 C T); (20814 15477913 C T); (20815 15478001 A C); (20816 15479091
G T); (20817 15479123 G A); (20818 15479799 A T); (20819 15479826 A G); (20820 15481340 C
T); (20821 15481518 A C); (20822 15481887 T C); (20823 15482034 A G); (20824 15482263 A G); (20825
15482374 C T); (20826 15482463 AT A); (20827 15483236 G A); (20828 15484288 C T); (20829 15484947
G A); (20830 15486636 T C); (20831 15486999 C T); (20832 15487193 A G); (20833 15488130 A
G); (20834 15488250 C T); (20835 15488278 G A); (20836 15488860 A T); (20837 15489069 T C); (20838
15489865 C T); (20839 15489895 T C); (20840 15490236 A G); (20841 15491156 C A); (20842 15491523
A G); (20843 15491973 C T); (20844 15492739 TA T); (20845 15493263 C T); (20846 15493303 G
A); (20847 15493491 A G); (20848 15493904 T G); (20849 15494078 G A); (20850 15494194 C T); (20851
15494262 G A); (20852 15494454 T G); (20853 15494919 G A); (20854 15495014 A G); (20855 15496109
G A); (20856 15496147 C T); (20857 15496282 A G); (20858 15496389 A G); (20859 15496875 C
A); (20860 15497904 T C); (20861 15498338 C CTA); (20862 15498609 G T); (20863 15498655 G
A); (20864 15499768 T C); (20865 15499950 C T); (20866 15500125 T C); (20867 15500462 A G); (20868
15501315 G A); (20869 15501749 A G); (20870 15503477 G A); (20871 15503610 G A); (20872 15505796
TCAA T); (20873 15506537 C T); (20874 15506553 T C); (20875 15506941 A C); (20876 15508615 C
T); (20877 15509441 T C); (20878 15509635 C T); (20879 15509642 G A); (20880 15509731 C T); (20881
15510027 C G); (20882 15510323 G A); (20883 15510563 G A); (20884 15512757 T C); (20885 15512830
A G); (20886 15512989 A G); (20887 15512999 C A); (20888 15513708 A G); (20889 15513720 A
T); (20890 15513986 G T); (20891 15514168 G A); (20892 15514339 T G); (20893 15514411 C G); (20894
15514466 A G); (20895 15515102 G A); (20896 15515159 A C); (20897 15515677 T C); (20898 15516248
A G); (20899 15517034 C T); (20900 15517665 C A); (20901 15517762 T A); (20902 15517799 G
A); (20903 15517971 A T); (20904 15518482 A C); (20905 15519590 T C); (20906 15519966 A T); (20907
15520324 T G); (20908 15520649 A T); (20909 15520700 G A); (20910 15520891 T A); (20911 15521499
T C); (20912 15521681 G A); (20913 15521723 T C); (20914 15521874 C T); (20915 15522043 A
G); (20916 15522250 C G); (20917 15522359 TTTTGAAATCGTGCTCAGCTC T); (20918 15522812 G
A); (20919 15522844 T C); (20920 15523307 C T); (20921 15524081 C A); (20922 15524934 C T); (20923
15525077 G A); (20924 15525206 C A); (20925 15525279 A C); (20926 15525509 G A); (20927 15525908
A T); (20928 15526088 G A); (20929 15526654 T C); (20930 15527419 T G); (20931 15527885 C T); (20932
15528135 C T); (20933 15528939 T C); (20934 15528950 G A); (20935 15529425 C T); (20936 15530625 T
TGA); (20937 15530922 TA T); (20938 15531118 T A); (20939 15531262 G A); (20940 15532892 A
T); (20941 15535146 A C); (20942 15541352 C G); (20943 15541463 T G); (20944 15543614 T A); (20945
15545332 T G); (20946 15545479 T G); (20947 15545649 C T); (20948 15545696 G A); (20949 15545888
T C); (20950 15546083 C T); (20951 15546392 C T); (20952 15546600 G A); (20953 15548783 G
A); (20954 15549306 G A); (20955 15549320 T G); (20956 15549485 C T); (20957 15550619 G A); (20958
15551385 A G); (20959 15551720 G A); (20960 15552945 G A); (20961 15553858 G T); (20962 15553944
G T); (20963 15554007 G A); (20964 15554013 A G); (20965 15554068 G A); (20966 15554115 G
A); (20967 15555242 G A); (20968 15555348 C T); (20969 15555455 C T); (20970 15555506 A G); (20971
15555683 A C); (20972 15555853 A G); (20973 15555925 C T); (20974 15556559 G A); (20975 15557073
A T); (20976 15557535 T C); (20977 15558114 G A); (20978 15558272 C A); (20979 15558285 C T); (20980
15558303 A G); (20981 15558335 T G); (20982 15558382 T C); (20983 15558426 G A); (20984 15559283
A C); (20985 15559792 A G); (20986 15560978 T C); (20987 15561140 A C); (20988 15562918 G
A); (20989 15563476 G A); (20990 15563486 G A); (20991 15563835 C A); (20992 15566196 C T); (20993
15566681 G A); (20994 15567280 A G); (20995 15567437 A G); (20996 15567461 G A); (20997 15567699
T G); (20998 15568213 A G); (20999 15568672 T C); (21000 15568840 T C); (21001 15569031 T A); (21002
15569311 A G); (21003 15569392 A AC); (21004 15569461 T C); (21005 15569720 G A); (21006
15570597 A G); (21007 15570710 G A); (21008 15570758 C T); (21009 15571896 G A); (21010 15572759
C A); (21011 15572824 G A); (21012 15572825 A G); (21013 15573730 A T); (21014 15574083 T
C); (21015 15574188 G A); (21016 15574485 T C); (21017 15574968 A G); (21018 15575215 T C); (21019
15575608 A G); (21020 15575896 C A); (21021 15576131 T C); (21022 15576208 A T); (21023 15576397
A G); (21024 15576593 G T); (21025 15576820 A G); (21026 15577232 C T); (21027 15577724 G
A); (21028 15577794 T C); (21029 15577835 A G); (21030 15578026 T A); (21031 15578639 C A); (21032
15579469 C T); (21033 15582081 C T); (21034 15582089 A G); (21035 15582365 C T); (21036 15583136 C
T); (21037 15583312 TAGAG T); (21038 15583736 C T); (21039 15583992 T C); (21040 15583993 T
G); (21041 15584555 C G); (21042 15584767 C T); (21043 15584886 G A); (21044 15584889 A G); (21045
15585088 T C); (21046 15585852 T C); (21047 15586206 C T); (21048 15586708 C T); (21049 15586799 A
G); (21050 15586869 G T); (21051 15587183 T C); (21052 15587240 C T); (21053 15587280 T G); (21054
15587624 A T); (21055 15587812 C T); (21056 15588259 G T); (21057 15588550 G A); (21058 15588562
T C); (21059 15589117 T C); (21060 15589614 T G); (21061 15589974 G T); (21062 15590695 T C); (21063
15591182 C T); (21064 15591891 G T); (21065 15591927 A G); (21066 15592019 T C); (21067 15592169
A T); (21068 15592281 T C); (21069 15592527 G A); (21070 15592680 G A); (21071 15592769 C
T); (21072 15594962 T C); (21073 15595597 A G); (21074 15596202 A G); (21075 15596322 A G); (21076
15596330 T G); (21077 15596375 G A); (21078 15597840 C A); (21079 15598464 T G); (21080 15598511
G T); (21081 15598512 A T); (21082 15598551 A G); (21083 15598711 G T); (21084 15599352 T
C); (21085 15599410 T C); (21086 15599411 C G); (21087 15599412 A T); (21088 15599413 A C); (21089
15599414 T A); (21090 15599415 G A); (21091 15599416 A T); (21092 15599417 C G); (21093 15599615
G T); (21094 15599619 G A); (21095 15599837 T A); (21096 15600490 T C); (21097 15606672 G
A); (21098 15606674 G A); (21099 15606724 G A); (21100 15606866 G A); (21101 15608440 T C); (21102
15608673 A T); (21103 15609105 C T); (21104 15609466 A T); (21105 15609515 A G); (21106 15609917
C G); (21107 15610220 G T); (21108 15610709 GTCCT G); (21109 15611315 A G); (21110 15611912 C
T); (21111 15612348 A G); (21112 15612393 C T); (21113 15614494 C T); (21114 15614720 AT A); (21115
15615337 A AC); (21116 15615385 T G); (21117 15615416 C A); (21118 15615977 C T); (21119 15616231
T C); (21120 15616322 T C); (21121 15616795 C T); (21122 15617870 T C); (21123 15618022 AT
A); (21124 15618111 C T); (21125 15618284 T C); (21126 15618959 A C); (21127 15618966 C T); (21128
15619667 G A); (21129 15620353 C T); (21130 15620918 T G); (21131 15621541 C T); (21132 15621589
G A); (21133 15621690 A C); (21134 15621776 G A); (21135 15621963 T G); (21136 15622001 G
T); (21137 15622142 C T); (21138 15622400 G C); (21139 15623277 C T); (21140 15624439 G A); (21141
15624751 C T); (21142 15625045 G A); (21143 15625168 A G); (21144 15625445 A C); (21145 15625508
C T); (21146 15625681 G A); (21147 15625914 A G); (21148 15627134 T C); (21149 15628286 A
G); (21150 15629032 C A); (21151 15629908 G A); (21152 15631061 G GC); (21153 15632260 C
T); (21154 15632277 T C); (21155 15632280 T A); (21156 15632426 C T); (21157 15632820 G C); (21158
15632894 C T); (21159 15633161 A G); (21160 15633442 A G); (21161 15633916 G A); (21162 15634429
G A); (21163 15634464 T C); (21164 15634788 G A); (21165 15634861 T C); (21166 15635274 G
T); (21167 15636097 G A); (21168 15636293 G A); (21169 15636304 G A); (21170 15638210 T C); (21171
15638293 G A); (21172 15638678 T G); (21173 15639148 C T); (21174 15639185 T G); (21175 15639411
A C); (21176 15639558 C T); (21177 15639702 C T); (21178 15639945 G A); (21179 15640163 G
C); (21180 15640373 G A); (21181 15641075 G T); (21182 15641248 T C); (21183 15641900 G A); (21184
15642117 A T); (21185 15642273 G A); (21186 15642612 GT G); (21187 15644080 C G); (21188
15644258 T C); (21189 15644293 G A); (21190 15644369 C T); (21191 15645251 C T); (21192 15646093 T
C); (21193 15646656 A G); (21194 15647391 A G); (21195 15648144 G GA); (21196 15648468 T
C); (21197 15649802 A C); (21198 15650998 C T); (21199 15651013 A G); (21200 15651020 G A); (21201
15651062 C T); (21202 15651483 C T); (21203 15651560 T A); (21204 15651632 C T); (21205 15651809 A
G); (21206 15653078 C T); (21207 15653402 G A); (21208 15653511 C A); (21209 15654143 A C); (21210
15654954 T C); (21211 15655441 C T); (21212 15659380 G T); (21213 15659648 A G); (21214 15659839
C T); (21215 15660562 A C); (21216 15660597 A T); (21217 15660758 TG T); (21218 15660980 G
A); (21219 15662691 C T); (21220 15663094 T C); (21221 15663717 G T); (21222 15663935 G A); (21223
15664470 G A); (21224 15664624 G A); (21225 15665570 A G); (21226 15665766 C T); (21227 15665782
A G); (21228 15665994 A G); (21229 15666663 A G); (21230 15668425 G C); (21231 15668783 C
T); (21232 15669326 A G); (21233 15669555 G A); (21234 15669733 G A); (21235 15669769 A T); (21236
15669876 G A); (21237 15669884 G A); (21238 15670014 T C); (21239 15670355 T C); (21240 15670592
T C); (21241 15670650 G A); (21242 15671312 G A); (21243 15671940 C T); (21244 15674454 T
C); (21245 15674458 G A); (21246 15674486 A G); (21247 15674569 C T); (21248 15674687 A G); (21249
15674692 G A); (21250 15676204 C T); (21251 15678277 G C); (21252 15678759 C T); (21253 15679210
A G); (21254 15680133 A C); (21255 15680160 G A); (21256 15682156 G A); (21257 15682403 G
C); (21258 15683411 C T); (21259 15684035 T A); (21260 15684515 T C); (21261 15685182 G A); (21262
15685220 C T); (21263 15685276 A G); (21264 15685281 G A); (21265 15685291 T C); (21266 15685472
A T); (21267 15685488 T C); (21268 15686437 A T); (21269 15686696 A G); (21270 15686839 C
CATGAATGGAATATGATTGTTGGTATGTGAA); (21271 15686888 T A); (21272 15687358 C T); (21273
15687494 T C); (21274 15687981 C T); (21275 15689107 T G); (21276 15689540 A G); (21277 15689681
C T); (21278 15690535 T C); (21279 15690657 C T); (21280 15691095 T C); (21281 15691508 T C); (21282
15691677 T C); (21283 15691836 A G); (21284 15692305 C T); (21285 15692493 G C); (21286 15692647
C T); (21287 15693036 G A); (21288 15693247 T C); (21289 15693441 A G); (21290 15693542 G
A); (21291 15694482 C T); (21292 15694521 T C); (21293 15694902 T A); (21294 15695472 A G); (21295
15696035 T C); (21296 15696137 C A); (21297 15696838 G T); (21298 15697294 T C); (21299 15698002 C
A); (21300 15698189 T G); (21301 15698402 A T); (21302 15698988 T A); (21303 15699110 G T); (21304
15699324 C T); (21305 15699414 T C); (21306 15699480 C T); (21307 15699625 C G); (21308 15699761 C
T); (21309 15699925 C A); (21310 15701458 T C); (21311 15701610 G A); (21312 15702566 C T); (21313
15702583 A G); (21314 15702932 A G); (21315 15702959 A C); (21316 15703205 A AT); (21317
15703350 C A); (21318 15703396 C T); (21319 15703878 C A); (21320 15704135 G A); (21321 15705029
T G); (21322 15705305 C T); (21323 15706578 C T); (21324 15706980 C T); (21325 15707068 T C); (21326
15707368 A C); (21327 15707630 G A); (21328 15708449 C T); (21329 15709438 C T); (21330 15709778
C A); (21331 15710601 C T); (21332 15710729 A G); (21333 15710793 C T); (21334 15710969 G
A); (21335 15711580 T C); (21336 15712138 G A); (21337 15712549 G A); (21338 15712581 A G); (21339
15712797 A G); (21340 15712998 A T); (21341 15713517 T C); (21342 15713934 A C); (21343 15714785
A G); (21344 15715244 G A); (21345 15715429 T C); (21346 15716446 G A); (21347 15717382 G
A); (21348 15717476 G C); (21349 15717528 G C); (21350 15718836 A C); (21351 15718841 T C); (21352
15719367 TG T); (21353 15719657 C A); (21354 15719667 C T); (21355 15720169 T C); (21356 15720234
G T); (21357 15721282 G A); (21358 15722344 T C); (21359 15723229 C CACTAA); (21360 15723383 A
G); (21361 15723394 G C); (21362 15723420 C T); (21363 15723843 G A); (21364 15724241 T C); (21365
15724321 A G); (21366 15724593 G A); (21367 15725028 A T); (21368 15725819 A G); (21369 15725885
G A); (21370 15725933 C T); (21371 15726573 C T); (21372 15727923 C A); (21373 15727925 C T); (21374
15728959 A G); (21375 15729148 A C); (21376 15730615 G T); (21377 15730756 C T); (21378 15731497
C A); (21379 15731596 G A); (21380 15731722 C T); (21381 15732138 T C); (21382 15732155 T C); (21383
15733261 T A); (21384 15733707 T C); (21385 15733869 C T); (21386 15733908 T G); (21387 15734590 T
C); (21388 15734697 C T); (21389 15735032 A G); (21390 15736018 C T); (21391 15737138 G A); (21392
15739415 G A); (21393 15739550 T C); (21394 15740076 C A); (21395 15740540 T C); (21396 15740542
T C); (21397 15740856 T C); (21398 15740865 T C); (21399 15741056 C T); (21400 15741222 C
CAG); (21401 15741793 C T); (21402 15741965 T C); (21403 15741966 C T); (21404 15741967 A
T); (21405 15742948 T C); (21406 15743338 C T); (21407 15743598 G A); (21408 15744916 T C); (21409
15744994 G T); (21410 15745939 C A); (21411 15746905 G A); (21412 15747445 C A); (21413 15748236
CAAATATTTTTGAAAACGCACCTTATCGGT C); (21414 15750621 A G); (21415 15751412 G A); (21416
15751859 G A); (21417 15752196 C A); (21418 15753443 G A); (21419 15753450 C T); (21420 15753844
C T); (21421 15754289 G C); (21422 15754538 G T); (21423 15754577 A C); (21424 15756083 C T); (21425
15756220 C T); (21426 15756255 T G); (21427 15757219 C T); (21428 15758037 G A); (21429 15758490
C T); (21430 15758492 T C); (21431 15758498 C T); (21432 15758500 T C); (21433 15758512 C T); (21434
15758514 T TATAC); (21435 15758538 TATATATATATATAC T); (21436 15759024 G A); (21437 15759030
G A); (21438 15759757 G GT); (21439 15760026 C CT); (21440 15760047 C T); (21441 15760054 C
T); (21442 15760389 T G); (21443 15760857 GA G); (21444 15761624 A G); (21445 15761885 T
A); (21446 15762298 T C); (21447 15762676 C T); (21448 15765370 G A); (21449 15765512 A AT); (21450
15765645 A G); (21451 15765670 G A); (21452 15765953 G T); (21453 15766152 A G); (21454 15766241
C T); (21455 15766331 T A); (21456 15766582 C T); (21457 15766965 A G); (21458 15767011 C
G); (21459 15767028 C T); (21460 15767243 T C); (21461 15767255 A G); (21462 15767683 A G); (21463
15767707 G A); (21464 15767882 A G); (21465 15768023 G A); (21466 15768031 C T); (21467 15768300
C T); (21468 15768391 T C); (21469 15769003 C T); (21470 15769044 T G); (21471 15769070 A G); (21472
15769671 G A); (21473 15769725 G A); (21474 15770660 C T); (21475 15772627 G A); (21476 15772731
C CT); (21477 15773232 G A); (21478 15774289 T A); (21479 15774292 T A); (21480 15774293 A
T); (21481 15774402 TA T); (21482 15776148 A T); (21483 15777107 T G); (21484 15777545 A C); (21485
15777720 C T); (21486 15778244 C T); (21487 15779250 G T); (21488 15780551 G A); (21489 15781031
G A); (21490 15781686 G C); (21491 15782057 G T); (21492 15782412 A C); (21493 15782609 C
T); (21494 15783313 T C); (21495 15783809 TAGTGTACACATTTG T); (21496 15786133 T C); (21497
15787069 A G); (21498 15789217 T A); (21499 15789603 T C); (21500 15789642 TG T); (21501 15791134
T C); (21502 15791910 C CATAT); (21503 15792034 C T); (21504 15792067 T C); (21505 15792478 A
G); (21506 15794246 T C); (21507 15794486 TTA T); (21508 15794987 C A); (21509 15795078 A
G); (21510 15796406 C T); (21511 15796682 C G); (21512 15797110 G T); (21513 15798628 C T); (21514
15799250 G A); (21515 15800330 G T); (21516 15800461 T C); (21517 15800916 T C); (21518 15801487
G GTGTTGAA); (21519 15802775 T G); (21520 15803466 T C); (21521 15807254 T G); (21522 15808019 C
T); (21523 15808781 G A); (21524 15809968 T A); (21525 15810082 C T); (21526 15810211 A G); (21527
15810578 C T); (21528 15812556 G T); (21529 15812649 G T); (21530 15815885 A T); (21531 15816254
G A); (21532 15816604 C G); (21533 15817050 G A); (21534 15817873 T C); (21535 15818028 G
A); (21536 15818153 G T); (21537 15818708 T C); (21538 15818730 G A); (21539 15818802 C T); (21540
15818906 T G); (21541 15819006 G C); (21542 15819820 A G); (21543 15821936 C T); (21544 15822209
A G); (21545 15822952 T C); (21546 15824732 A G); (21547 15825849 C CA); (21548 15825999 G
T); (21549 15826187 C T); (21550 15827444 C A); (21551 15827541 G A); (21552 15827635 T C); (21553
15828092 C G); (21554 15829028 G A); (21555 15829271 T G); (21556 15829830 G GACA); (21557
15830413 G T); (21558 15830845 G C); (21559 15832090 T TA); (21560 15833535 G A); (21561
15833696 C T); (21562 15833874 G A); (21563 15833933 G A); (21564 15834361 A G); (21565 15834380
A G); (21566 15834530 G A); (21567 15836004 C T); (21568 15836016 T C); (21569 15836052 G
A); (21570 15838736 A G); (21571 15839019 G A); (21572 15839363 G A); (21573 15839659 C T); (21574
15839834 G T); (21575 15840633 A G); (21576 15841214 G T); (21577 15841656 T C); (21578 15842195
G T); (21579 15842524 A G); (21580 15842628 G C); (21581 15844633 G A); (21582 15844862 A
G); (21583 15845160 T G); (21584 15845646 T G); (21585 15846037 C T); (21586 15847534 A G); (21587
15847674 T A); (21588 15847712 C G); (21589 15847746 G A); (21590 15847969 G
GTCTATCATAGTGT); (21591 15848067 C T); (21592 15848561 A G); (21593 15848606 A G); (21594
15848634 C T); (21595 15850073 G T); (21596 15850162 T C); (21597 15850636 C T); (21598 15850902 A
C); (21599 15851018 A G); (21600 15851049 G A); (21601 15852448 T C); (21602 15852774 A G); (21603
15852858 A C); (21604 15853009 C T); (21605 15853260 C G); (21606 15853857 A G); (21607 15854176
C CT); (21608 15854454 G A); (21609 15855799 G A); (21610 15856678 T A); (21611 15857029 T
C); (21612 15857287 G A); (21613 15857924 G T); (21614 15858259 G A); (21615 15858538 T C); (21616
15858622 C T); (21617 15858726 G A); (21618 15858884 C T); (21619 15859191 C T); (21620 15860035 T
C); (21621 15862963 G T); (21622 15863375 T C); (21623 15864175 A AT); (21624 15864272 A C); (21625
15864407 T C); (21626 15864420 G A); (21627 15864536 A G); (21628 15864721 G A); (21629 15864899
G A); (21630 15864901 C T); (21631 15865291 T C); (21632 15865662 AT A); (21633 15866933 C
A); (21634 15867549 C T); (21635 15867923 T C); (21636 15869193 C T); (21637 15869324 T C); (21638
15869868 C T); (21639 15870476 C T); (21640 15870946 A G); (21641 15871825 C T); (21642 15872076
G T); (21643 15872629 A G); (21644 15874208 G C); (21645 15874282 C A); (21646 15874283 C
T); (21647 15874402 G C); (21648 15875060 T C); (21649 15875217 C T); (21650 15876328 A G); (21651
15876768 T C); (21652 15877098 C T); (21653 15878293 C T); (21654 15879198 A G); (21655 15879566
G A); (21656 15879604 A G); (21657 15879737 G A); (21658 15880094 G A); (21659 15880295 A
G); (21660 15880465 G A); (21661 15881139 T C); (21662 15881426 G A); (21663 15881463 T C); (21664
15881917 T C); (21665 15882236 T C); (21666 15882417 C T); (21667 15882563 C A); (21668 15882600 T
G); (21669 15882814 T C); (21670 15883199 A G); (21671 15883240 G A); (21672 15883648 G A); (21673
15884906 G T); (21674 15885168 T C); (21675 15885276 C A); (21676 15885403 C T); (21677 15885404 T
A); (21678 15885405 A G); (21679 15885406 A G); (21680 15885420 GT G); (21681 15886724 A
G); (21682 15887069 C G); (21683 15887182 T G); (21684 15887353 A C); (21685 15887570 A T); (21686
15888021 A C); (21687 15889295 T A); (21688 15890860 T G); (21689 15890891 A AAT); (21690
15893078 G T); (21691 15893838 C T); (21692 15894013 C T); (21693 15895115 T C); (21694 15895130
TC T); (21695 15895180 A G); (21696 15895673 G A); (21697 15895709 A G); (21698 15895921 C
T); (21699 15896423 G T); (21700 15897075 GT G); (21701 15897346 C T); (21702 15897626 G T); (21703
15898417 A T); (21704 15899033 T C); (21705 15899821 G A); (21706 15902152 A G); (21707 15902612
A G); (21708 15902909 A C); (21709 15903405 G C); (21710 15904429 T A); (21711 15904682 G
A); (21712 15905575 T C); (21713 15905659 C T); (21714 15905689 T TG); (21715 15905691 G T); (21716
15906238 T G); (21717 15907813 C T); (21718 15907907 A G); (21719 15907967 T C); (21720 15907989
T A); (21721 15909165 G A); (21722 15909185 T C); (21723 15909529 C T); (21724 15911137 G
A); (21725 15912061 G T); (21726 15912189 C G); (21727 15913382 T C); (21728 15913919 C T); (21729
15914522 A G); (21730 15915292 T A); (21731 15916155 C T); (21732 15916650 C A); (21733 15917275
CT C); (21734 15917586 A AT); (21735 15917833 A G); (21736 15918237 T C); (21737 15918629 T
C); (21738 15918662 T C); (21739 15918746 G A); (21740 15918928 G T); (21741 15921256 C T); (21742
15921570 G GTT); (21743 15922683 C G); (21744 15923167 C T); (21745 15923669 G GA); (21746
15923937 G A); (21747 15924018 C T); (21748 15924131 T C); (21749 15925387 G A); (21750 15927608
A T); (21751 15927815 T G); (21752 15930731 C G); (21753 15930762 C A); (21754 15932133 A
T); (21755 15932788 A G); (21756 15932865 C T); (21757 15933114 C T); (21758 15933186 C T); (21759
15933578 C T); (21760 15933801 A C); (21761 15934231 A G); (21762 15934232 C T); (21763 15934298
A T); (21764 15936015 C T); (21765 15938015 T G); (21766 15938543 C A); (21767 15938852 A T); (21768
15938854 G GAT); (21769 15939085 T C); (21770 15940156 T C); (21771 15940648 C T); (21772
15941894 A T); (21773 15942049 T C); (21774 15942830 A C); (21775 15943849 C T); (21776 15943861 T
C); (21777 15944662 G T); (21778 15945567 C T); (21779 15945956 G C); (21780 15946397 T C); (21781
15946682 CCTT C); (21782 15947164 G A); (21783 15947803 C T); (21784 15948579 A G); (21785
15949594 G A); (21786 15949882 C T); (21787 15949926 C T); (21788 15949994 C T); (21789 15950106
A G); (21790 15950630 T C); (21791 15950657 G A); (21792 15951198 A C); (21793 15951362 C
T); (21794 15951798 C G); (21795 15952043 G T); (21796 15952269 G C); (21797 15953297 C T); (21798
15954097 G T); (21799 15954805 G C); (21800 15955916 A AT); (21801 15956202 A G); (21802
15956969 G A); (21803 15957108 T C); (21804 15957662 G A); (21805 15960188 GTGTATGTATGTA
G); (21806 15960805 G A); (21807 15960944 A G); (21808 15961171 C G); (21809 15961607 A G); (21810
15961664 G A); (21811 15961783 C G); (21812 15962903 A G); (21813 15962994 A AT); (21814
15964364 T TA); (21815 15964719 T C); (21816 15965050 T C); (21817 15965120 G A); (21818 15966001
T C); (21819 15966479 C T); (21820 15966733 A C); (21821 15969031 G A); (21822 15969850 C T); (21823
15969882 G A); (21824 15970425 T C); (21825 15971269 A T); (21826 15972604 G A); (21827 15972666
T G); (21828 15973574 C T); (21829 15975487 C T); (21830 15975626 T C); (21831 15975633 G A); (21832
15976252 T C); (21833 15977530 A G); (21834 15978585 T TTA); (21835 15979662 C T); (21836
15980047 C T); (21837 15980970 G A); (21838 15981677 T C); (21839 15981678 T A); (21840 15981688
C T); (21841 15981995 A T); (21842 15982256 A T); (21843 15982897 T C); (21844 15983616 G A); (21845
15984721 A C); (21846 15985398 T C); (21847 15985638 G A); (21848 15987094 C T); (21849 15987507
G T); (21850 15987718 G A); (21851 15987728 T G); (21852 15988105 G A); (21853 15988410 G
GA); (21854 15988908 G A); (21855 15988909 C T); (21856 15989075 G A); (21857 15990956 C
A); (21858 15990977 C T); (21859 15991359 C T); (21860 15991384 G A); (21861 15991459 A G); (21862
15992152 T A); (21863 15992205 G A); (21864 15992299 A G); (21865 15992547 A T); (21866 15993090
C T); (21867 15993999 A G); (21868 15994695 C T); (21869 15994753 A G); (21870 15995022 T
G); (21871 15995083 CAA C); (21872 15996588 C T); (21873 15996928 G A); (21874 15997408 A
T); (21875 15997938 A G); (21876 15998666 G A); (21877 16000362 A G); (21878 16000909 T C); (21879
16001029 C T); (21880 16001228 T C); (21881 16001300 G T); (21882 16001460 C T); (21883 16001962 A
G); (21884 16002020 T C); (21885 16002281 G T); (21886 16003038 A G); (21887 16003179 C T); (21888
16003296 A T); (21889 16004597 T C); (21890 16004629 T C); (21891 16005590 C G); (21892 16005902 C
G); (21893 16005930 G A); (21894 16006088 C T); (21895 16006153 G A); (21896 16008723 CAACTT
C); (21897 16009133 T A); (21898 16010076 G A); (21899 16011917 T C); (21900 16012157 G A); (21901
16012244 T G); (21902 16012364 G A); (21903 16012707 T C); (21904 16012914 C T); (21905 16012929
T C); (21906 16012939 G A); (21907 16012998 G A); (21908 16014660 G A); (21909 16014742 T
C); (21910 16014852 T G); (21911 16016108 G T); (21912 16017459 T C); (21913 16017528 G A); (21914
16017712 G A); (21915 16019106 C T); (21916 16019216 C T); (21917 16019301 A G); (21918 16019484
C T); (21919 16019531 C T); (21920 16019826 G A); (21921 16020085 G A); (21922 16020970 G
A); (21923 16021425 G A); (21924 16021478 T C); (21925 16021684 CT C); (21926 16023035 T C); (21927
16023123 T G); (21928 16024316 C T); (21929 16024736 C T); (21930 16025422 A G); (21931 16025547
G GAAAACAAACAAAAAATAT); (21932 16025607 C T); (21933 16026280 C T); (21934 16027431 G
A); (21935 16027451 T A); (21936 16028638 G A); (21937 16029272 C T); (21938 16030985 G A); (21939
16032078 C T); (21940 16032457 G T); (21941 16032483 A T); (21942 16033357 A C); (21943 16034210
GT G); (21944 16034240 G A); (21945 16034585 C T); (21946 16035647 A G); (21947 16037605 C
A); (21948 16037780 G T); (21949 16038977 G C); (21950 16039488 C T); (21951 16039632 T C); (21952
16040123 A C); (21953 16040281 T G); (21954 16040380 T C); (21955 16040421 C T); (21956 16040519
AGTGAT A); (21957 16041985 G A); (21958 16042357 T G); (21959 16042455 G A); (21960 16043601 T
TTTATTATTATTATTATTATTA); (21961 16044467 T A); (21962 16044469 T A); (21963 16045388 C
T); (21964 16046068 A G); (21965 16046183 T A); (21966 16046357 TC T); (21967 16046359 T A); (21968
16046380 C T); (21969 16046510 C T); (21970 16046637 T C); (21971 16047694 GA G); (21972 16049365
A T); (21973 16051185 T C); (21974 16051342 T G); (21975 16051480 CTACAAAAGGCA C); (21976
16051558 A C); (21977 16052396 G T); (21978 16052870 C T); (21979 16053239 A T); (21980 16054738
C CATAT); (21981 16055005 C T); (21982 16055643 T C); (21983 16055731 G T); (21984 16055947 C
T); (21985 16056481 G A); (21986 16057073 A G); (21987 16058039 C A); (21988 16058907 G A); (21989
16059241 T C); (21990 16059255 A G); (21991 16060956 T A); (21992 16060974 C T); (21993 16062120
C T); (21994 16062415 T G); (21995 16063641 C T); (21996 16063724 G A); (21997 16066901 A
G); (21998 16067001 G A); (21999 16068344 C T); (22000 16068524 T C); (22001 16069218 C A); (22002
16069272 C G); (22003 16069492 G A); (22004 16070014 A G); (22005 16070030 C T); (22006 16070121
G A); (22007 16070139 C T); (22008 16070270 G A); (22009 16070885 A G); (22010 16071179 A
G); (22011 16071483 CCGGGGGAGTGGTG C); (22012 16071506 C G); (22013 16072454 C T); (22014
16072523 C T); (22015 16072714 A G); (22016 16072730 G A); (22017 16072779 C T); (22018 16072824
T TTGGCGCTGA); (22019 16073143 G A); (22020 16073244 T TA); (22021 16073999 G A); (22022
16074089 G A); (22023 16074397 C T); (22024 16074578 G A); (22025 16075154 A
ATGGCGCCATCTGGCGCTAC); (22026 16075971 C T); (22027 16077050 C G); (22028 16077213 C
A); (22029 16077775 G C); (22030 16078239 C T); (22031 16079023 A G); (22032 16079942 T G); (22033
16080725 G T); (22034 16081065 A G); (22035 16081183 C A); (22036 16082041 T C); (22037 16083576
T C); (22038 16083707 GT G); (22039 16083866 T A); (22040 16084024 A G); (22041 16084113 A
G); (22042 16088614 C T); (22043 16088677 C A); (22044 16089073 A
AAGTGAAGGTACTTTATACCAAATT); (22045 16089426 T C); (22046 16091363 T A); (22047 16093233 G
A); (22048 16093262 A G); (22049 16093330 C G); (22050 16093391 A G); (22051 16093407 A G); (22052
16093617 G GA); (22053 16095669 T C); (22054 16097972 T C); (22055 16098007 C T); (22056 16098760
T C); (22057 16100690 A C); (22058 16101880 C T); (22059 16102139 G A); (22060 16102389 A
C); (22061 16102767 C G); (22062 16102816 T C); (22063 16103954 T G); (22064 16104240 A G); (22065
16104617 T C); (22066 16107011 T C); (22067 16108223 T C); (22068 16108524 G A); (22069 16108534
A G); (22070 16111125 G C); (22071 16112400 C G); (22072 16112739 CATCCA C); (22073 16112834 C
T); (22074 16113037 G A); (22075 16114202 A G); (22076 16114442 T C); (22077 16114792 C A); (22078
16114891 C T); (22079 16115202 A G); (22080 16115390 G A); (22081 16115526 T C); (22082 16115842
G A); (22083 16115970 A G); (22084 16117844 C T); (22085 16118069 G C); (22086 16118094 C
A); (22087 16118182 C T); (22088 16119139 C T); (22089 16119413 A G); (22090 16119470 C T); (22091
16119581 C T); (22092 16119639 G A); (22093 16119665 T C); (22094 16119693 T C); (22095 16119764 T
C); (22096 16119780 C T); (22097 16119978 C T); (22098 16120127 A G); (22099 16120139 C G); (22100
16120166 C T); (22101 16120432 C T); (22102 16120540 T C); (22103 16120623 A G); (22104 16120775 T
C); (22105 16121412 A G); (22106 16122909 C T); (22107 16124356 A G); (22108 16125117 A G); (22109
16125327 G T); (22110 16125360 T C); (22111 16125575 C T); (22112 16126086 A C); (22113 16126159 T
C); (22114 16127938 G A); (22115 16128036 G A); (22116 16128403 GA G); (22117 16129391 C
A); (22118 16131071 A C); (22119 16131271 AT A); (22120 16131599 T G); (22121 16132143 G A); (22122
16132899 A T); (22123 16132989 T C); (22124 16133111 A C); (22125 16133265 G T); (22126 16133443
A T); (22127 16133489 T A); (22128 16133565 C A); (22129 16134400 G T); (22130 16135346 T C); (22131
16135991 A C); (22132 16136237 C G); (22133 16136673 G A); (22134 16136925 C T); (22135 16137484
C T); (22136 16137816 G C); (22137 16138043 G A); (22138 16138238 C T); (22139 16138399 C T); (22140
16138508 G A); (22141 16139700 A G); (22142 16140493 C T); (22143 16141038 C T); (22144 16141636
T C); (22145 16141641 G A); (22146 16141881 G T); (22147 16142393 A AT); (22148 16143094 C
T); (22149 16144021 G A); (22150 16144158 A G); (22151 16144662 A G); (22152 16145267 T G); (22153
16145734 G A); (22154 16145804 C A); (22155 16145979 C T); (22156 16146657 A G); (22157 16146661
G A); (22158 16146731 G A); (22159 16146854 G A); (22160 16146874 G T); (22161 16147154 A
G); (22162 16147163 G T); (22163 16147210 G C); (22164 16147270 A G); (22165 16147551 A
AT); (22166 16147841 T A); (22167 16148175 A G); (22168 16148286 A T); (22169 16148497 G A); (22170
16148993 C T); (22171 16149678 G T); (22172 16149826 G A); (22173 16149847 T A); (22174 16150318
G A); (22175 16150475 A T); (22176 16151091 C T); (22177 16151092 A C); (22178 16151328 T C); (22179
16151826 C A); (22180 16152492 A C); (22181 16152602 G A); (22182 16153217 G A); (22183 16153874
G A); (22184 16154045 A G); (22185 16154209 C T); (22186 16154366 C T); (22187 16155127 G
T); (22188 16155385 C T); (22189 16155682 C T); (22190 16156538 T C); (22191 16156545 G A); (22192
16156885 T C); (22193 16157204 G A); (22194 16157281 A G); (22195 16158115 A G); (22196 16158129
C T); (22197 16158201 A G); (22198 16158274 G A); (22199 16158425 G A); (22200 16160108 G
A); (22201 16160157 C T); (22202 16160286 G A); (22203 16160881 A T); (22204 16160992 C T); (22205
16161441 A G); (22206 16161661 G A); (22207 16162155 G A); (22208 16162161 G A); (22209 16162802
G T); (22210 16163239 G T); (22211 16163889 C T); (22212 16165661 T C); (22213 16165895 T C); (22214
16166780 A T); (22215 16167025 A G); (22216 16167478 T C); (22217 16168160 G A); (22218 16168942
G A); (22219 16169039 C T); (22220 16169948 T A); (22221 16171249 C T); (22222 16171381 C T); (22223
16172000 A G); (22224 16172121 C T); (22225 16172719 T G); (22226 16172934 C T); (22227 16173135
G A); (22228 16174046 G T); (22229 16174320 C T); (22230 16174359 G C); (22231 16175257 C
T); (22232 16175454 T C); (22233 16175549 T A); (22234 16177568 A G); (22235 16177638 G A); (22236
16177665 G A); (22237 16177989 G A); (22238 16178006 C T); (22239 16178347 A C); (22240 16178461
G A); (22241 16178550 G A); (22242 16178697 T C); (22243 16179046 G A); (22244 16181716 A
G); (22245 16181863 G A); (22246 16184916 A C); (22247 16185152 C T); (22248 16185527 A C); (22249
16185729 T C); (22250 16185770 T G); (22251 16186116 G T); (22252 16186261 G C); (22253 16186315
G A); (22254 16186471 G A); (22255 16186921 G A); (22256 16186971 A G); (22257 16187281 A
T); (22258 16187566 A G); (22259 16187996 G A); (22260 16188571 G A); (22261 16188834 C T); (22262
16189559 A C); (22263 16189560 G A); (22264 16189582 A G); (22265 16189838 G A); (22266 16190512
G A); (22267 16190513 T G); (22268 16190530 T C); (22269 16190892 A G); (22270 16191115 G
A); (22271 16191352 G A); (22272 16192541 T C); (22273 16192724 A T); (22274 16192767 G A); (22275
16193127 A T); (22276 16193167 C G); (22277 16193308 A G); (22278 16193411 G A); (22279 16193474
C CAT); (22280 16193545 C G); (22281 16195463 A G); (22282 16195584 G A); (22283 16196460 T
C); (22284 16197070 G A); (22285 16197465 T G); (22286 16197493 C T); (22287 16198231 G C); (22288
16198680 T C); (22289 16198797 T C); (22290 16199298 G A); (22291 16199912 C T); (22292 16200063
A G); (22293 16201051 G A); (22294 16201448 T C); (22295 16201512 T C); (22296 16201876 T
C); (22297 16202087 C T); (22298 16202666 T C); (22299 16202692 C T); (22300 16202866 G A); (22301
16202917 G A); (22302 16203408 T C); (22303 16203990 G A); (22304 16205045 A T); (22305 16205393
G T); (22306 16206673 C T); (22307 16207211 A G); (22308 16208589 G A); (22309 16208794 T
G); (22310 16208897 G A); (22311 16208947 A G); (22312 16209745 C T); (22313 16209910 T C); (22314
16210119 T C); (22315 16210121 A G); (22316 16210210 T G); (22317 16210240 C T); (22318 16210273
A G); (22319 16210287 T C); (22320 16211463 C G); (22321 16211781 C T); (22322 16212508 C T); (22323
16212842 G GA); (22324 16212952 T A); (22325 16212979 T A); (22326 16214705 A G); (22327
16215764 T A); (22328 16216603 A G); (22329 16217188 A G); (22330 16217189 T G); (22331 16217190
A T); (22332 16217191 T A); (22333 16217192 A C); (22334 16217193 T G); (22335 16217195 T A); (22336
16217930 G A); (22337 16218875 T C); (22338 16218875 TATAC T); (22339 16219053 A AT); (22340
16220128 A G); (22341 16221044 C G); (22342 16222217 G A); (22343 16223033 C G); (22344 16223416
C T); (22345 16223495 G A); (22346 16223625 C T); (22347 16224098 G C); (22348 16225819 G
T); (22349 16227272 G A); (22350 16227848 T G); (22351 16228084 G T); (22352 16228090 A T); (22353
16228746 A G); (22354 16229926 A G); (22355 16230210 GA G); (22356 16230548 C T); (22357
16230904 A G); (22358 16231151 T C); (22359 16231169 G A); (22360 16231387 A G); (22361 16233615
G A); (22362 16234224 T TTA); (22363 16235161 C T); (22364 16236303 A AT); (22365 16236453 G
A); (22366 16236676 A G); (22367 16236776 T C); (22368 16238251 G A); (22369 16238455 G A); (22370
16238686 C A); (22371 16239013 C A); (22372 16239037 T C); (22373 16239969 T C); (22374 16240046
A C); (22375 16240380 G A); (22376 16240600 G C); (22377 16240630 T G); (22378 16240731 G
A); (22379 16242641 G T); (22380 16243098 G A); (22381 16243779 T G); (22382 16243798 T G); (22383
16244293 C T); (22384 16244345 G A); (22385 16244658 GA G); (22386 16245899 A G); (22387
16246249 A G); (22388 16246484 C A); (22389 16248610 C T); (22390 16249261 T A); (22391 16250022
A G); (22392 16250434 A C); (22393 16250713 G T); (22394 16251322 A G); (22395 16251462 G
C); (22396 16251536 G A); (22397 16251655 T G); (22398 16251688 C A); (22399 16252492 A G); (22400
16252662 A G); (22401 16253918 C T); (22402 16254005 T C); (22403 16254296 T C); (22404 16254962
A G); (22405 16256433 C A); (22406 16256668 T C); (22407 16256796 C A); (22408 16256877 T
C); (22409 16257550 G A); (22410 16258105 A C); (22411 16258254 C A); (22412 16258333 A C); (22413
16258360 A G); (22414 16259054 C A); (22415 16259635 G T); (22416 16260186 G A); (22417 16260493
T C); (22418 16260566 G A); (22419 16261429 A G); (22420 16261521 A G); (22421 16262022 C
G); (22422 16262113 C T); (22423 16262434 A C); (22424 16262609 A G); (22425 16263061 A G); (22426
16263280 C T); (22427 16264102 T C); (22428 16265266 A G); (22429 16265453 C G); (22430 16266239
T A); (22431 16266245 C T); (22432 16266592 AT A); (22433 16267717 C T); (22434 16267771 G
T); (22435 16267854 C T); (22436 16268102 T C); (22437 16269260 C T); (22438 16269868 T C); (22439
16269911 T A); (22440 16270512 G A); (22441 16272024 G A); (22442 16272276 C T); (22443 16272517
A C); (22444 16273854 C A); (22445 16274009 G A); (22446 16274115 T C); (22447 16274125 G
A); (22448 16274130 C A); (22449 16275620 A G); (22450 16275782 T C); (22451 16276671 C T); (22452
16276977 C T); (22453 16277582 A G); (22454 16277642 C T); (22455 16277710 T C); (22456 16278197
G A); (22457 16278937 A G); (22458 16279887 C T); (22459 16280195 T G); (22460 16280830 T
C); (22461 16280987 G A); (22462 16281069 C G); (22463 16282070 G A); (22464 16282813 T C); (22465
16282911 C T); (22466 16283841 C G); (22467 16283843 A ACATAT); (22468 16283886 T G); (22469
16285470 C T); (22470 16285658 C T); (22471 16285790 C T); (22472 16285866 A G); (22473 16285957
A G); (22474 16286694 C T); (22475 16286761 C T); (22476 16287122 G A); (22477 16287376 T
C); (22478 16287548 G A); (22479 16287619 C A); (22480 16287835 C T); (22481 16287842 G T); (22482
16288892 G A); (22483 16288989 G A); (22484 16289003 G A); (22485 16289363 G C); (22486 16289569
C T); (22487 16289589 G T); (22488 16289601 A G); (22489 16290508 G A); (22490 16290811 T
TA); (22491 16291429 G A); (22492 16291497 G A); (22493 16291592 A G); (22494 16291594 T
C); (22495 16292001 A G); (22496 16292067 C T); (22497 16292880 A G); (22498 16293320 T C); (22499
16293800 A C); (22500 16294270 G C); (22501 16295061 G A); (22502 16296337 G A); (22503 16297175
G A); (22504 16297905 T C); (22505 16297958 C T); (22506 16297960 C T); (22507 16297961 G
A); (22508 16297962 G T); (22509 16297964 G T); (22510 16299089 A G); (22511 16299169 A G); (22512
16299329 T C); (22513 16302139 A C); (22514 16303331 G A); (22515 16303441 C T); (22516 16303739
T C); (22517 16304400 C T); (22518 16304438 G A); (22519 16305263 G A); (22520 16305272 C
A); (22521 16305303 C G); (22522 16307079 A T); (22523 16307080 G T); (22524 16307081 G A); (22525
16307082 T A); (22526 16307105 ACCAAGAGGGGGGGTGAATTGGT A); (22527 16307337 A G); (22528
16308424 T G); (22529 16308696 G A); (22530 16308851 G A); (22531 16309314 A G); (22532 16309327
A C); (22533 16310726 A C); (22534 16310853 T C); (22535 16310965 C T); (22536 16311463 G C); (22537
16312017 G T); (22538 16312406 C T); (22539 16312476 G A); (22540 16313467 C T); (22541 16314463
G T); (22542 16315589 G C); (22543 16317594 TA T); (22544 16317846 G A); (22545 16318094 A
G); (22546 16319785 T A); (22547 16319814 C T); (22548 16320127 G A); (22549 16320244 T A); (22550
16320497 AT A); (22551 16322375 A G); (22552 16322753 C T); (22553 16323622 G T); (22554 16324505
T G); (22555 16325297 T C); (22556 16325777 A G); (22557 16326261 T G); (22558 16326339 C
T); (22559 16327097 C T); (22560 16328781 C T); (22561 16328984 T A); (22562 16329073 A G); (22563
16329495 T C); (22564 16329617 G T); (22565 16329622 A T); (22566 16330090 A G); (22567 16330212
G A); (22568 16330821 T C); (22569 16330934 AT A); (22570 16331288 G T); (22571 16331492 G
T); (22572 16332074 G A); (22573 16332286 A G); (22574 16332354 T C); (22575 16333967 A G); (22576
16334036 G A); (22577 16334301 T C); (22578 16334304 G T); (22579 16334399 G A); (22580 16334738
C T); (22581 16334997 A G); (22582 16335319 A ATAATT); (22583 16336241 C T); (22584 16337280 AT
A); (22585 16337504 CT C); (22586 16338711 G A); (22587 16339047 G A); (22588 16339186 C A); (22589
16339305 G A); (22590 16340060 T G); (22591 16340319 C T); (22592 16340818 T C); (22593 16340833
T TGG); (22594 16341093 C T); (22595 16341096 C T); (22596 16341231 C T); (22597 16341429 T
C); (22598 16341637 A G); (22599 16342129 G GA); (22600 16342234 T G); (22601 16344788 T
C); (22602 16346434 A G); (22603 16346651 G A); (22604 16346949 C T); (22605 16347024 C A); (22606
16347090 G A); (22607 16347838 C A); (22608 16348127 AT A); (22609 16348359 T A); (22610
16349586 C T); (22611 16349599 C A); (22612 16350151 T C); (22613 16351432 A G); (22614 16352201
G A); (22615 16352309 G C); (22616 16352737 C T); (22617 16353034 C A); (22618 16353585 C
G); (22619 16355197 A C); (22620 16355308 G T); (22621 16355575 A T); (22622 16356099 C T); (22623
16356139 C T); (22624 16356237 A C); (22625 16356287 T G); (22626 16357132 G A); (22627 16358806
C T); (22628 16359199 A G); (22629 16360630 A T); (22630 16360655 T G); (22631 16362829 C T); (22632
16363408 C A); (22633 16364335 A G); (22634 16364348 G A); (22635 16364631 T C); (22636 16365110
G T); (22637 16365790 T A); (22638 16365878 C T); (22639 16365894 T C); (22640 16365911 G T); (22641
16365913 C T); (22642 16365958 T C); (22643 16366634 C T); (22644 16366997 C T); (22645 16367534 T
C); (22646 16367708 GA G); (22647 16368191 C A); (22648 16368378 G GT); (22649 16369607 C
G); (22650 16370072 C T); (22651 16370096 C T); (22652 16370136 A T); (22653 16370774 T C); (22654
16371386 G A); (22655 16372751 T G); (22656 16373376 G A); (22657 16373480 T C); (22658 16375000
G A); (22659 16375982 T C); (22660 16376363 C T); (22661 16376459 C T); (22662 16376944 A
G); (22663 16377280 C T); (22664 16377694 G A); (22665 16378235 T C); (22666 16378257 G C); (22667
16378794 G A); (22668 16379068 G A); (22669 16379178 T G); (22670 16379615 C T); (22671 16379760
C T); (22672 16380256 T C); (22673 16381618 G A); (22674 16381814 C G); (22675 16384027 G
A); (22676 16384243 G A); (22677 16384244 T G); (22678 16384347 G A); (22679 16384354 T C); (22680
16385240 C A); (22681 16385442 T C); (22682 16385477 G A); (22683 16388827 T C); (22684 16389509
G A); (22685 16390208 C T); (22686 16391038 A G); (22687 16391096 A G); (22688 16391892 A
AT); (22689 16392708 G A); (22690 16393563 G T); (22691 16394255 T TGATTAAAATTACTC); (22692
16394508 G T); (22693 16394546 A G); (22694 16395179 A G); (22695 16395488 G A); (22696 16395975
T C); (22697 16396249 G C); (22698 16396730 T A); (22699 16397675 G A); (22700 16399574 G
A); (22701 16399748 T C); (22702 16399755 C A); (22703 16400338 T C); (22704 16400726 G C); (22705
16401009 TA T); (22706 16401114 A G); (22707 16401332 A C); (22708 16401389 C T); (22709 16402267
C T); (22710 16402292 A T); (22711 16402451 C A); (22712 16402758 G A); (22713 16403660 G
T); (22714 16404162 A C); (22715 16404515 T TATATAG); (22716 16405079 A G); (22717 16405278 C
T); (22718 16407184 A G); (22719 16407642 C T); (22720 16407892 C G); (22721 16408687 C A); (22722
16409006 G A); (22723 16409749 T G); (22724 16409842 C T); (22725 16409962 T C); (22726 16409978
T A); (22727 16410216 A G); (22728 16410233 A G); (22729 16411063 T C); (22730 16411086 T
C); (22731 16411126 C T); (22732 16411138 C T); (22733 16411167 G C); (22734 16414596 C A); (22735
16415063 G A); (22736 16417000 C T); (22737 16418372 G T); (22738 16421051 A T); (22739 16421130
G A); (22740 16422652 G A); (22741 16423037 G C); (22742 16423423 G A); (22743 16423796 C
T); (22744 16423905 G C); (22745 16424064 T C); (22746 16424178 G A); (22747 16424308 C T); (22748
16424701 G C); (22749 16424750 C T); (22750 16425195 A G); (22751 16425229 C T); (22752 16425260
A AT); (22753 16426692 A G); (22754 16426700 T G); (22755 16427934 C T); (22756 16428052 A
G); (22757 16428088 C A); (22758 16434266 G A); (22759 16435066 CAGCATTT C); (22760 16435067 G
A); (22761 16436223 T TTTTTCTTC); (22762 16436763 C A); (22763 16436870 C T); (22764 16437169 G
C); (22765 16437604 C A); (22766 16437825 C T); (22767 16438090 G A); (22768 16439243 G T); (22769
16440184 C T); (22770 16441812 G T); (22771 16442993 A G); (22772 16445254 T G); (22773 16445338
T C); (22774 16445765 G GTTGACTACCTAACAATTCTTGTAAGGTACA); (22775 16447231 T C); (22776
16447446 A C); (22777 16447809 T C); (22778 16449381 A C); (22779 16449463 A G); (22780 16450508
C T); (22781 16451004 G C); (22782 16451710 C T); (22783 16451780 G A); (22784 16451868 G
A); (22785 16452103 G A); (22786 16452886 G A); (22787 16453417 G A); (22788 16454050 C T); (22789
16454828 G T); (22790 16454860 T C); (22791 16455312 A G); (22792 16455385 C T); (22793 16455404
A C); (22794 16455806 A G); (22795 16455874 A C); (22796 16456138 A G); (22797 16457168 C
T); (22798 16457522 A G); (22799 16457697 C A); (22800 16457924 G T); (22801 16458148 T C); (22802
16458416 T C); (22803 16458417 A T); (22804 16458418 G A); (22805 16458650 C T); (22806 16459059
C T); (22807 16459889 G C); (22808 16460386 A G); (22809 16460515 T C); (22810 16460625 G
A); (22811 16460681 C T); (22812 16461122 G A); (22813 16461962 G A); (22814 16462000 A G); (22815
16462027 C T); (22816 16462146 A G); (22817 16462627 G A); (22818 16463473 A G); (22819 16463585
G A); (22820 16464140 G A); (22821 16464481 G A); (22822 16465142 G A); (22823 16465555 G
A); (22824 16465704 C T); (22825 16465720 C A); (22826 16466600 G A); (22827 16467575 G A); (22828
16468280 C T); (22829 16468379 A C); (22830 16468740 C T); (22831 16470254 T C); (22832 16470258 A
T); (22833 16471124 G A); (22834 16471258 A G); (22835 16472826 T A); (22836 16473133 T G); (22837
16473805 T C); (22838 16473827 T C); (22839 16474721 G C); (22840 16476343 T G); (22841 16476745
T C); (22842 16476797 C A); (22843 16476968 G A); (22844 16477390 T C); (22845 16477546 A T); (22846
16477830 C A); (22847 16478424 C T); (22848 16478797 AT A); (22849 16479546 G A); (22850 16479807
G A); (22851 16480424 C T); (22852 16481650 T C); (22853 16482366 T C); (22854 16482684 T
TC); (22855 16482896 G T); (22856 16483148 T G)

### Example 3: Introgression of R-Gene Interval Into Glycine max Lines

[0276] Known methods of introgression from wild glycine species involve doubled F1 plants (FiD). However, such methods tend to be inefficient with a low number of infertile hybrids being produced. Further, few hybrids survive the subsequent chromosome doubling process wherein the chromosomes of the infertile hybrid are doubled by a chemical agent (typically colchicine) to make it fertile.

[0277] In another method of introgression from wild glycine species, as described below and illustrated at FIG. 11, Applicants introgressed the ASR resistance trait using tetraploid soy. Briefly, the method of introgression using tetraploid soy involves doubling a domestic G. max genome to make it more compatible and efficient for crossing with a wild Glycine genome. The method allows for the efficient production of fertile hybrids that can be further backcrossed to move desirable genes and traits from wild glycine into domestic and elite G. max soybean lines, without the need for artificial genetic modification or gene editing.

[0278] Doubled soy lines (tetraploid soy) were generated from two ASR susceptible G. max elite lines, herein referred to as Female 1 and Female 2 (two Syngenta proprietary lines). The double susceptible G. max line had 2n=40 chromosomes (GiGi genome) and after doubling is in a tetraploid state as 4n=80. In comparison, the G. tomentella resistant parent has 2n=78 or 40 chromosomes (D₃E₁ or D genome, respectively). For the doubling, immature soybean embryos of the G. max lines in tissue culture medium were treated with approximately 0.25-1.0 Omg/ml colchicine for 3-4 days at 25° C. Regenerated plants were transferred to soil, and leaf samples were taken for ploidy analysis to confirm chromosome doubling. Tetraploid plants were allowed to self, and ploidy analysis was performed on embryos to confirm doubling. An unlimited seed supply was produced by allowing the tetraploid soy to self.

[0279] Flower buds prior to anthesis were prepared for the doubled female lines by gently removing sepals and petals to expose the mature stigma. Pollen from freshly opened flowers of G. tomentella (2n=78 or 40) was obtained by gently removing the petals to expose the mature anthers and dusting the pollen onto the soybean stigma. The crosses are shown at Table 3.

TABLE 3
Plant Crossings

| | Male species and | | Female species and |
|---|---|---|---|
| PI# (male) | 2n Chromosome # | PI # (female) | 2n Chromosome # |
| PI505267 | G. tomentella; | Female 1 | G. max; 2n = 40 |
| | 2n = 40 | | |
| PI505267 | G. tomentella; | Female 2 | G. max; 2n = 40 |
| | 2n = 40 | | |

[0280] Dicamba, a synthetic auxin herbicide (FeXapan, Corteva Agriscience, Wilmington, DE), was sprayed on the tetraploid x Glycine crosses to produce pod and embryo formation. Dicamba was sprayed at a 3 to 20 mg/L concentration. A spray bottle or atomizer was used to achieve good saturation of the pollinated gynoecia and the node to which it was attached.

[0281] Multiple B1 embryos and a B1 plant was generated by crossing the doubled susceptible G. max parent with the resistant G. tomentella parent (these plants would have been the FlD plants if standard introgression was used). The cross was then verified via TaqMan assays (Applied Biosystems, Waltham, MA). In one particular example, the TaqMan assays depicted at Table 4 were used to confirm the presence of the chromosomal interval associated with ASR resistance (that is, the interval comprising SEQ ID NO: 1) in the hybrid plants.

TABLE 4
Taqman data to confirm hybrids

| | TaqMan | TaqMan | TaqMan | TaqMan | TaqMan | TaqMan |
|---|---|---|---|---|---|---|
| | 3289 | 3316 | 3434 | 3435 | 3537 | 3538 |
| | Copy# | Copy# | Copy# | Copy# | Copy# | Copy# |
| Cross | level | level | level | level | level | level |
| Female only | 0 | 0 | 0 | 0 | 0 | 0 |
| Female 1 × | 0 | 1 | 1 | 0 | 1 | 0 |
| PI505267 | | | | | | |

[0282] It is well known in the art that given the sequence and the SNP allele associated with a given trait (e.g. ASR resistance), one having ordinary skill in the art could develop oligonucleotide primers and use said primers to identify plants carrying the chromosomal interval depicted in SEQ ID NO: 1, or a functional fragment thereof comprising the causative gene. A TAQMAN® assay (e.g. generally a two-step allelic discrimination assay or similar), a KASP™ assay (generally a one-step allelic discrimination assay defined below or similar), or both can be employed to assay the SNPs as disclosed herein. In an exemplary two-step assay, a forward primer, a reverse primer, and two assay probes (or hybridization oligos; herein also referred to as assay primers or assay probes) are employed (see SEQ ID NOs: 22-237 detailed at Tables 5-6). The forward and reverse primers are employed to amplify genetic loci that comprise SNPs that are associated with ASR resistance loci. The particular nucleotides that are present at the SNP positions are then assayed using the assay primer, which in each pair differ from each other with respect to the nucleotides that are present at the SNP position (although it is noted that in any given pair, the primers can differ in their 5′ or 3′ ends without impacting their abilities to differentiate between nucleotides present at the corresponding SNP positions). In some embodiments, each pair of assay primers are differentially labeled with, for example, fluorophores to permit distinguishing between the two assay probes in a single reaction. In some embodiments, the assay primers and the reaction conditions are designed such that an assay primer will only hybridize to the reverse complement of a 100% perfectly matched sequence, thereby permitting identification of which allele(s) is/are present based upon detection of hybridizations.

[0283] Table 5 provides a list of example assay IDs, wherein each assay ID corresponds to a particular SNP position within the chromosomal interval represented by SEQ ID NO: 1. The assays are designed to differentiate between favorable and unfavorable alleles associated with a given SNP position, as indicated.

[0284] Table 6 provides a list and sequence of the assay components used in each of the assays listed in Table 5. Particularly, Table 6 lists the sequences of the specific forward and reverse primers as well as the sequence and combination of fluorophores used for each of the assays. In the listing of the assay components, the assay component ID indicates the associated assay ID (Table 5) and the nature of the component (whether it is a probe or a primer). The suffix F2 indicates that the corresponding sequence is for a forward primer, the suffix R1 indicates that the corresponding sequence is for a forward primer, the suffix FM indicates that the corresponding sequence is for an assay probe having the FAM fluorophore, and the suffix TT indicates that the corresponding sequence is for an assay probe having the TET fluorophore. For example, “S21399A1FM”, “S21399A1TT”, “S21399F2” and “S21399R1” refer, respectively, to the FAM probe, TET probe, forward primer, and reverse primer for Assay ID S21399 used for identification of the allele corresponding to the SNP at position 10832017.

TABLE 5
Assays associated with SNP positions within SEQ ID NO:
1 that are associated with increased resistance to ASR

| | Favorable Allele | Unfavorable allele | |
|---|---|---|---|
| Position | (Rust Resistant) | (Rust Susceptible) | Assay ID |
| 9673275 | A | G | S21473 |
| 10442099 | C | T | S21899 |
| 10458451 | G | T | S21868 |
| 10577275 | G | T | S21574 |
| 10584306 | G | A | S21546 |
| 10653990 | T | C | S21524 |
| 10789947 | C | T | S21595 |
| 10790147 | A | T | S21550 |
| 10791059 | A | G | S21410 |
| 10791213 | G | A | S21484 |
| 10791310 | T | C | S21425 |
| 10791380 | T | A | S21556 |
| 10791581 | G | A | S21416 |
| 10832017 | C | T | S21399 |
| 10832133 | C | T | S21435 |
| 10832300 | G | A | S21504 |
| 10832584 | G | A | S21470 |
| 10833393 | T | C | S21495 |
| 10867232 | T | G | S21525 |
| 10867366 | A | G | S21593 |
| 10867536 | G | A | S21406 |
| 10875079 | G | A | S21516 |
| 10875110 | C | T | S21466 |
| 10875181 | C | T | S21421 |
| 10875235 | G | T | S21472 |
| 10881334 | G | C | S21587 |
| 10881474 | A | G | S21559 |
| 10881948 | A | C | S21530 |
| 10892735 | A | G | S21500 |
| 10892762 | G | T | S21536 |
| 10892926 | C | T | S21584 |
| 10892975 | A | G | S21468 |
| 10892980 | T | C | S21572 |
| 10892981 | A | G | S21509 |
| 10893019 | A | G | S21471 |
| 10907830 | T | C | S21443 |
| 10907844 | G | A | S21420 |
| 10907888 | T | C | S21441 |
| 10907918 | A | G | S21520 |
| 10916866 | T | C | S21422 |
| 11641302 | C | T | S21911 |
| 12396655 | A | G | S21459 |
| 12556909 | C | T | S21407 |
| 12677703 | T | G | S21527 |
| 12689190 | A | G | S21508 |
| 12830968 | T | C | S21463 |
| 12931808 | G | A | S21505 |
| 12940915 | A | T | S21446 |
| 13106765 | G | A | S21476 |
| 13605770 | C | A | S21442 |
| 13658793 | C | T | S21562 |
| 15286080 | T | C | S21497 |
| 15315501 | C | T | S21512 |
| 15586799 | A | G | S21454 |

TABLE 6
Sequences of assay components used in assays associated with SNP positions
within SEQ ID NO: 1. Suffix “F2” refers to a forward primer; Suffix
“R1” refers to a reverse primer. Primers with a common prefix can
form a primer pair. Suffix FM and TT refer to probes.

| Assay | | | | |
|---|---|---|---|---|
| component | DNA sequence | SEQ ID NO. | Fluor. | Allele |
| S21399A1FM | TCGAGCTCTGGTGTC | SEQ ID NO: 2 | FAM | G |
| S21399A2TT | CCTCGAGCTTTGGTGT | SEQ ID NO: 3 | TET | A |
| S21399F2 | GAGACCCATTGCGTGGAAAG | SEQ ID NO: 4 | | |
| S21399R1 | CAACGGCGTTAAGGAATACCCT | SEQ ID NO: 5 | | |
| S21406A1FM | CTTCAGCCTCATCGG | SEQ ID NO: 6 | FAM | G |
| S21406A2TT | TCTTCAGCTTCATCGG | SEQ ID NO: 7 | TET | A |
| S21406F2 | GACGCCCGTGCAGTAGAG | SEQ ID NO: 8 | | |
| S21406R1 | AGTGCTCCTAAGGTGTTGCCT | SEQ ID NO: 9 | | |
| S21407A1FM | CTTTAATCCCCACAAACTG | SEQ ID NO: 10 | FAM | A |
| S21407A2TT | TTAATCCCCGCAAACTG | SEQ ID NO: 11 | TET | G |
| S21407F1 | CAGCTCATGCTCATAGTCCTCA | SEQ ID NO: 12 | | |
| S21407R2 | AAGACCACCGTCCTCACTG | SEQ ID NO: 13 | | |
| S21410A1FM | CCCCGTTTTCACTTTAAA | SEQ ID NO: 14 | FAM | G |
| S21410A2TT | CCCCCGTTTTTACTTTAA | SEQ ID NO: 15 | TET | A |
| S21410F1 | GAGGCGATACGGCCAATCAG | SEQ ID NO: 16 | | |
| S21410R2 | CCTCCATATCCTCCCTTGTGAAG | SEQ ID NO: 17 | | |
| S21416A1FM | CGATTCTCCGGGTACA | SEQ ID NO: 18 | FAM | G |
| S21416A2TT | AGCTCGATTCTCTGGGTA | SEQ ID NO: 19 | TET | A |
| S21416F2 | GGAACTGGAGCAAATGGAGGTT | SEQ ID NO: 20 | | |
| S21416R1 | GGTCGAGGTTTCATGTCGCTAT | SEQ ID NO: 21 | | |
| S21420A1FM | TCATGGACCCGTCTTT | SEQ ID NO: 22 | FAM | G |
| S21420A2TT | TTTCATGGACCTGTCTTT | SEQ ID NO: 23 | TET | A |
| S21420F2 | CTTAGAATCTTGTGCGGTGACAAAT | SEQ ID NO: 24 | | |
| S21420R1 | CAAACTCGTGCTTTCAGATTCAGT | SEQ ID NO: 25 | | |
| S21421A1FM | CTACTAACAAATTATAAGGCACT | SEQ ID NO: 26 | FAM | A |
| S21421A2TT | ACTAACAAATTATGAGGCACT | SEQ ID NO: 27 | TET | G |
| S21421F1 | CCTCTTTGTGAGTCGTGTCCAA | SEQ ID NO: 28 | | |
| S21421R2 | TCAGTCTCTCTCCTCAACTACCTT | SEQ ID NO: 29 | | |
| S21422A1FM | CAGGTGGCACAACATCA | SEQ ID NO: 30 | FAM | A |
| S21422A2TT | AGGTGGCACGACATCAC | SEQ ID NO: 31 | TET | G |
| S21422F1 | CTCCAGCCGTAGGATGACTT | SEQ ID NO: 32 | | |
| S21422R2 | GGAGGCAGTTAGTGAAGAATGTG | SEQ ID NO: 33 | | |
| S21425A1FM | CGAGAAGGCCGACTGA | SEQ ID NO: 34 | FAM | G |
| S21425A2TT | TCCGAGAAGGCTGACTG | SEQ ID NO: 35 | TET | A |
| S21425F1 | CCTGTGTCCGGATCACATACTG | SEQ ID NO: 36 | | |
| S21425R2 | TTGCGAGATGCAATTGAGAAGT | SEQ ID NO: 37 | | |
| S21435A1FM | AATTCCAACCCCATCTC | SEQ ID NO: 38 | FAM | G |
| S21435A2TT | AATTCCAACTCCATCTCA | SEQ ID NO: 39 | TET | A |
| S21435F2 | GAGGAGGTGGTCCTAGGGTAT | SEQ ID NO: 40 | | |
| S21435R1 | CCCGGAACATAAGTCTCTACAAGA | SEQ ID NO: 41 | | |
| S21441A1FM | CACCGCACAAGATTCTA | SEQ ID NO: 42 | FAM | A |
| S21441A2TT | CACCGCACAGGATTCT | SEQ ID NO: 43 | TET | G |
| S21441F1 | CAGTTTTCATGGACCCGTCTTTG | SEQ ID NO: 44 | | |
| S21441R2 | AGTGGATCCTAAACCCTAAACACA | SEQ ID NO: 45 | | |
| S21442A1FM | TTGGGAGGGATGGGAGGT | SEQ ID NO: 46 | FAM | C |
| S21442A2TT | CTTGGGAGGGATTGGAGGT | SEQ ID NO: 47 | TET | A |
| S21442F2 | CAAGGAGGTGGGTTGGACTATAAG | SEQ ID NO: 48 | | |
| S21442R1 | GCCAGCTGCAACATAGCCT | SEQ ID NO: 49 | | |
| S21443A1FM | TCCATGAAAACCGAATCTG | SEQ ID NO: 50 | FAM | G |
| S21443A2TT | TCCATGAAAACTGAATCTGA | SEQ ID NO: 51 | TET | A |
| S21443F2 | TGAAACGTCCAGGTACAACGAAT | SEQ ID NO: 52 | | |
| S21443R1 | CTTAGAATCTTGTGCGGTGACA | SEQ ID NO: 53 | | |
| S21446A1FM | CTCTCCCTTTAATTGATCA | SEQ ID NO: 54 | FAM | T |
| S21446A2TT | CTCTCCCTTTTATTGATCA | SEQ ID NO: 55 | TET | A |
| S21446F1 | TGATTTACCTGCCAACCTCTCTA | SEQ ID NO: 56 | | |
| S21446R2 | AAGCCACTCGCAAGGACCATT | SEQ ID NO: 57 | | |
| S21454A1FM | ACCCTATGGACTCCTACAG | SEQ ID NO: 58 | FAM | G |
| S21454A2TT | CCTATGGACTCTTACAGC | SEQ ID NO: 59 | TET | A |
| S21454F1 | TCGAGTCGGGAATGGGTAGAG | SEQ ID NO: 60 | | |
| S21454R2 | GAAAGCCAAACCTTCAAACCAC | SEQ ID NO: 61 | | |
| S21459A1FM | AGGGATGACTATGCTGTTATAG | SEQ ID NO: 62 | FAM | G |
| S21459A2TT | AGGAGGGATGACTATGTTGTTA | SEQ ID NO: 63 | TET | A |
| S21459F1 | GGACTCTTGGAGACTATGCTTATCA | SEQ ID NO: 64 | | |
| S21459R2 | GGCTTCAGTTCCACAACCTTATTG | SEQ ID NO: 65 | | |
| S21463A1FM | CAATTTGGCGACTGCAT | SEQ ID NO: 66 | FAM | A |
| S21463A2TT | AATTTGGCGGCTGCATG | SEQ ID NO: 67 | TET | G |
| S21463F2 | GCATCACACATTAGCTCAAAGGG | SEQ ID NO: 68 | | |
| S21463R1 | TGCAAAGAGGCATTTAAGGGATT | SEQ ID NO: 69 | | |
| S21466A1FM | TTTGTGAGTCATGTCCAA | SEQ ID NO: 70 | FAM | A |
| S21466A2TT | TGTGAGTCGTGTCCAA | SEQ ID NO: 71 | TET | G |
| S21466F2 | GCCGAATGGATCACATGTCCT | SEQ ID NO: 72 | | |
| S21466R1 | TCCTCAACTACCTTTTCCCCAAA | SEQ ID NO: 73 | | |
| S21468A1FM | AGACAACAATGTCAATGAGTCT | SEQ ID NO: 74 | FAM | A |
| S21468A2TT | ACAACAATGTCAGTGAGTCT | SEQ ID NO: 75 | TET | G |
| S21468F2 | GTCACTCCATCCATATCTAGCCTT | SEQ ID NO: 76 | | |
| S21468R1 | GAAGCCGTTGTATCCGAGGTG | SEQ ID NO: 77 | | |
| S21470A1FM | CAGGCTCACATCCTAC | SEQ ID NO: 78 | FAM | A |
| S21470A2TT | AGGCTCACGTCCTACA | SEQ ID NO: 79 | TET | G |
| S21470F1 | CGTGGCTACTACCACCAGAGAT | SEQ ID NO: 80 | | |
| S21470R2 | TCATGTGAACGACTTAGGACCAT | SEQ ID NO: 81 | | |
| S21471A1FM | CCATCCATATCTAGCCTT | SEQ ID NO: 82 | FAM | A |
| S21471A2TT | CCATATCTGGCCTTGAC | SEQ ID NO: 83 | TET | G |
| S21471F1 | GTACCTCAAGCAGTGAACTGAA | SEQ ID NO: 84 | | |
| S21471R2 | GAGGTGCAAAGACTCATTGACA | SEQ ID NO: 85 | | |
| S21472A1FM | TGTGTAGTAGGGTGATTAAATT | SEQ ID NO: 86 | FAM | C |
| S21472A2TT | TATTGTGTAGTAGGGTTATTAAATT | SEQ ID NO: 87 | TET | A |
| S21472F1 | TGCCGAATGGATCACATGTCCT | SEQ ID NO: 88 | | |
| S21472R2 | TCCTCAACTACCTTTTCCCCAAA | SEQ ID NO: 89 | | |
| S21473A1FM | TTGGTCTTGTGAACATAGG | SEQ ID NO: 90 | FAM | G |
| S21473A2TT | TTTGGTCTTGTGAATATAGGA | SEQ ID NO: 91 | TET | A |
| S21473F2 | CCGGAGGATGAACTGATGGA | SEQ ID NO: 92 | | |
| S21473R1 | TGGTGGCCTTACAATGCTG | SEQ ID NO: 93 | | |
| S21476A1FM | TGCCACCGAAGTGC | SEQ ID NO: 94 | FAM | G |
| S21476A2TT | CTTGCCACTGAAGTGC | SEQ ID NO: 95 | TET | A |
| S21476F1 | GGAGGCTCCAAGATCACATAAGG | SEQ ID NO: 96 | | |
| S21476R2 | TGATGCCATCCCACTATCCA | SEQ ID NO: 97 | | |
| S21484A1FM | AAGAGACCCCATGAAGCC | SEQ ID NO: 98 | FAM | A |
| S21484A2TT | AGACCCCGTGAAGCC | SEQ ID NO: 99 | TET | G |
| S21484F1 | CAACATGACAAAAGAGATGAGGGA | SEQ ID NO: 100 | | |
| S21484R2 | GGTTCCGGGAATATGTCGTTATC | SEQ ID NO: 101 | | |
| S21495A1FM | TGTCAACACTCAGGTGA | SEQ ID NO: 102 | FAM | G |
| S21495A2TT | CCTGTCAACACTTAGGTG | SEQ ID NO: 103 | TET | A |
| S21495F1 | GCCTCCTCCTTGGAGATGTTC | SEQ ID NO: 104 | | |
| S21495R2 | CAAGGAATCAAGGTCTCAAATCACA | SEQ ID NO: 105 | | |
| S21497A1FM | AGACCTCAACAGCAATATAATC | SEQ ID NO: 106 | FAM | A |
| S21497A2TT | CTCAACAGCAGTATAATCC | SEQ ID NO: 107 | TET | G |
| S21497F1 | CCATGCAACCTGACCAGTCATTC | SEQ ID NO: 108 | | |
| S21497R2 | GGACCAGGACCATACCTCAA | SEQ ID NO: 109 | | |
| S21500A1FM | AGAAGATGGTCCCATATGTCT | SEQ ID NO: 110 | FAM | A |
| S21500A2TT | AAGATGGTCCCGTATGTC | SEQ ID NO: 111 | TET | G |
| S21500F1 | TCACCATGTCATATCCATGTCGTA | SEQ ID NO: 112 | | |
| S21500R2 | TGCAATTTGCCTCCGAAAGAAG | SEQ ID NO: 113 | | |
| S21504A1FM | TAGAGCTGTTGACATGTTG | SEQ ID NO: 114 | FAM | G |
| S21504A2TT | TTAGAGCTGTTGATATGTTGT | SEQ ID NO: 115 | TET | A |
| S21504F1 | GACTCTGCTCAGGCTAAGACA | SEQ ID NO: 116 | | |
| S21504R2 | GGGCTGATTATATGGTTGCTATGA | SEQ ID NO: 117 | | |
| S21505A1FM | AAGATCGCGTTTTAGAGGAG | SEQ ID NO: 118 | FAM | A |
| S21505A2TT | CGCGTTTTGGAGGAGA | SEQ ID NO: 119 | TET | G |
| S21505F1 | GGTCGGTGCAGACTATATTAAAGGG | SEQ ID NO: 120 | | |
| S21505R2 | GGGTCATCAGGCAAGGTCAT | SEQ ID NO: 121 | | |
| S21508A1FM | TTTGGTTCCAAGTGTGGG | SEQ ID NO: 122 | FAM | A |
| S21508A2TT | ATTGATTTGGTTCCAGGTGTG | SEQ ID NO: 123 | TET | G |
| S21508F1 | CACCGGACAGAGGGATAGAGTT | SEQ ID NO: 124 | | |
| S21508R2 | CATGCGGTAAGGAGCTATGGA | SEQ ID NO: 125 | | |
| S21509A1FM | CTCATTGACACTGTTGTC | SEQ ID NO: 126 | FAM | G |
| S21509A2TT | AGACTCATTGACATTGTTGTC | SEQ ID NO: 127 | TET | A |
| S21509F2 | TGTCACTCCATCCATATCTAGCCT | SEQ ID NO: 128 | | |
| S21509R1 | GAAGCCGTTGTATCCGAGGT | SEQ ID NO: 129 | | |
| S21512A1FM | CCATCCATTCGAGCAG | SEQ ID NO: 130 | FAM | G |
| S21512A2TT | CATCCATTTGAGCAGTC | SEQ ID NO: 131 | TET | A |
| S21512F2 | CACAACCCACGCGGAGTC | SEQ ID NO: 132 | | |
| S21512R1 | CGTAGTTCCACGCGATCAGT | SEQ ID NO: 133 | | |
| S21516A1FM | AGACTTCAATGCCGAATGG | SEQ ID NO: 134 | FAM | G |
| S21516A2TT | CAAAGACTTCAATGTCGAATG | SEQ ID NO: 135 | TET | A |
| S21516F2 | TTGGACACGACTCACAAAGA | SEQ ID NO: 136 | | |
| S21516R1 | GTGTTCCTACAAGACAATGCCTCT | SEQ ID NO: 137 | | |
| S21520A1FM | CGACATCAAATCTAAGACAATT | SEQ ID NO: 138 | FAM | A |
| S21520A2TT | CGACATCAAATCTAGGACAAT | SEQ ID NO: 139 | TET | G |
| S21520F1 | AGTGGATCCTAAACCCTAAACACA | SEQ ID NO: 140 | | |
| S21520R2 | TTGTCACCGCACAAGATTCTAAG | SEQ ID NO: 141 | | |
| S21524A1FM | ACCACAGCTATCAGAAAAGA | SEQ ID NO: 142 | FAM | G |
| S21524A2TT | TAGGACCACAGCTATTAGAAA | SEQ ID NO: 143 | TET | A |
| S21524F1 | CCACCAAGCTACCTGATTCCAGAT | SEQ ID NO: 144 | | |
| S21524R2 | TGGGATGACCTTAAGAGAATGTTTC | SEQ ID NO: 145 | | |
| S21525A1FM | CTTTCGACGAAGATTCTCA | SEQ ID NO: 146 | FAM | A |
| S21525A2TT | TCGACGACGATTCTCA | SEQ ID NO: 147 | TET | C |
| S21525F2 | TTGCAGGTGTCGTTGTAAGTTG | SEQ ID NO: 148 | | |
| S21525R1 | AGCAGCGACAATGGCAGAG | SEQ ID NO: 149 | | |
| S21527A1FM | TGACCACAGCTCCAG | SEQ ID NO: 150 | FAM | C |
| S21527A2TT | TTGACCACATCTCCAGT | SEQ ID NO: 151 | TET | A |
| S21527F2 | CCGCTTGGAAGCATCACA | SEQ ID NO: 152 | | |
| S21527R1 | TGAGGAGTGTTTCTTGAGTTTGAA | SEQ ID NO: 153 | | |
| S21530A1FM | ACAGAGTACACATGAACTAC | SEQ ID NO: 154 | FAM | C |
| S21530A2TT | TACAGAGTACACATTAACTACT | SEQ ID NO: 155 | TET | A |
| S21530F2 | GCATTGTTGTGGCAGATATGTTTG | SEQ ID NO: 156 | | |
| S21530R1 | TCTCGAGGGCCTATTTCATTTGA | SEQ ID NO: 157 | | |
| S21536A1FM | TAAGTCTTCTGAATCCCA | SEQ ID NO: 158 | FAM | C |
| S21536A2TT | TATAAGTCTTCTTAATCCCA | SEQ ID NO: 159 | TET | A |
| S21536F1 | AGACCGGATAGGGATGGAAA | SEQ ID NO: 160 | | |
| S21536R2 | CCGTCTGCGTGTCTGTGAAT | SEQ ID NO: 161 | | |
| S21546A1FM | TTCAAAATGGTAGACACTCA | SEQ ID NO: 162 | FAM | A |
| S21546A2TT | TTCAAAATGGTGGACACTC | SEQ ID NO: 163 | TET | G |
| S21546F1 | GATGAAGTTGATAGGACACAGTGAA | SEQ ID NO: 164 | | |
| S21546R2 | AGTGAGAGCTTGATGGAATATGGA | SEQ ID NO: 165 | | |
| S21550A1FM | TGAGTTGTTACAAGCTGGAT | SEQ ID NO: 166 | FAM | A |
| S21550A2TT | TGAGTTGTTACATGCTGGAT | SEQ ID NO: 167 | TET | T |
| S21550F1 | GAACACAGGCATTACACAATCACA | SEQ ID NO: 168 | | |
| S21550R2 | GGACCATGACCACATTTGAAAGC | SEQ ID NO: 169 | | |
| S21556A1FM | CCGGGTCCATTGTGG | SEQ ID NO: 170 | FAM | T |
| S21556A2TT | CGGGTCCTTTGTGGAA | SEQ ID NO: 171 | TET | A |
| S21556F1 | GGTCGCATTCACCGAGATGA | SEQ ID NO: 172 | | |
| S21556R2 | CCAGCATTGGTCCGTGGTATG | SEQ ID NO: 173 | | |
| S21559A1FM | TTAGTTGGTTCAGCAAACA | SEQ ID NO: 174 | FAM | A |
| S21559A2TT | ATTAGTTGGTTCGGCAAAC | SEQ ID NO: 175 | TET | G |
| S21559F2 | TGCAAGAAACAATAGCCTACAAAGG | SEQ ID NO: 176 | | |
| S21559R1 | GCTCCCAGGCTAAGATAATGC | SEQ ID NO: 177 | | |
| S21562A1FM | ATGCTTTAAATTCGTTCCCA | SEQ ID NO: 178 | FAM | G |
| S21562A2TT | TGCTTTAAATTTGTTCCCAA | SEQ ID NO: 179 | TET | A |
| S21562F2 | TCCAAAGGCAGGCAATAGC | SEQ ID NO: 180 | | |
| S21562R1 | ACCACTCAGAATCTGTGCAACTTC | SEQ ID NO: 181 | | |
| S21572A1FM | ACTCATTGACATTGTTGTC | SEQ ID NO: 182 | FAM | A |
| S21572A2TT | AAGACTCATTGACGTTGTTGT | SEQ ID NO: 183 | TET | G |
| S21572F1 | GAAGCCGTTGTATCCGAGGT | SEQ ID NO: 184 | | |
| S21572R2 | TGTCACTCCATCCATATCTAGCCT | SEQ ID NO: 185 | | |
| S21574A1FM | TGAACCACGATGTCTTC | SEQ ID NO: 186 | FAM | A |
| S21574A2TT | TGAACCACGCTGTCTT | SEQ ID NO: 187 | TET | C |
| S21574F2 | GGCAACAACCTCACTAGATTCATTG | SEQ ID NO: 188 | | |
| S21574R1 | TGGTTGGTGAAGTCGTACTCT | SEQ ID NO: 189 | | |
| S21584A1FM | CACTCTCCAACGTATCA | SEQ ID NO: 190 | FAM | G |
| S21584A2TT | AATCACTCTCCAATGTATCA | SEQ ID NO: 191 | TET | A |
| S21584F2 | CGTGATCTGGGACATGAGTCT | SEQ ID NO: 192 | | |
| S21584R1 | ACCTCGGATACAACGGCTTCTTC | SEQ ID NO: 193 | | |
| S21587A1FM | AGGAATACAAGAGCAGAAGCTC | SEQ ID NO: 194 | FAM | G |
| S21587A2TT | AAGGAATACAAGAGGAGAAGCTC | SEQ ID NO: 195 | TET | C |
| S21587F2 | GGTTCAGCAAACAAAGGAGACA | SEQ ID NO: 196 | | |
| S21587R1 | AAGGACAGAGGAAGTATAGGAGGTG | SEQ ID NO: 197 | | |
| S21593A1FM | TACGATTCCTCTATCTTC | SEQ ID NO: 198 | FAM | G |
| S21593A2TT | TTCTACGATTCCTTTATCTT | SEQ ID NO: 199 | TET | A |
| S21593F2 | GCGTAGCCTTGGTGGATGAAG | SEQ ID NO: 200 | | |
| S21593R1 | GTCGCTGCTCCTGCTCTTG | SEQ ID NO: 201 | | |
| S21595A1FM | TCCGGAGAATACATCCAT | SEQ ID NO: 202 | FAM | A |
| S21595A2TT | CGGAGAATGCATCCATA | SEQ ID NO: 203 | TET | G |
| S21595F2 | GGGTGCATCGGGATTTGATTG | SEQ ID NO: 204 | | |
| S21595R1 | AGACCAGTTGGTCGATAATTCTTC | SEQ ID NO: 205 | | |
| S21868A1FM | TATATTTTTACACAATTTGGTG | SEQ ID NO: 206 | FAM | A |
| S21868A2TT | TATTTTTACACGATTTGGTG | SEQ ID NO: 207 | TET | G |
| S21868F1 | CACAAATGATGCTAAGGTGGTGATA | SEQ ID NO: 208 | | |
| S21868R2 | TGTTGCAGAAATGCGTTCCTC | SEQ ID NO: 209 | | |
| S21899A1FM | CGAACTGGCACGATTTG | SEQ ID NO: 210 | FAM | A |
| S21899A2TT | CTGGCGCGATTTGC | SEQ ID NO: 211 | TET | G |
| S21899F1 | TCGAGTTACATTCCCACATCTGAA | SEQ ID NO: 212 | | |
| S21899R2 | CGCGGTACTCACACGACTA | SEQ ID NO: 213 | | |
| S21911A1FM | CCAGTATGAGGTATTAGACC | SEQ ID NO: 214 | FAM | A |
| S21911A2TT | AGCCAGTATGAGGTGTTAGAC | SEQ ID NO: 215 | TET | G |
| S21911F1 | TGGCATGGCTCTATGAGATGA | SEQ ID NO: 216 | | |
| S21911R2 | CCCAGTTCTCTGGTTACTCAAC | SED ID NO: 217 | | |

[0285] Introgression of the R gene intervals into G. max can alternatively be achieved using embryo rescue and chemical doubling. Therein, first an infertile hybrid of G. max and G. tomentella must be produced, which is an inefficient process resulting in low numbers of infertile hybrids. Next, embryo rescue must be performed and chemical treatment applied in order to generate amphidiploid shoots. If the amphidiploid plants are fertile, they are used to backcross with G. max for several generations in order to gradually eliminate the perennial Glycine chromosomes.

[0286] In one example, a wide cross is performed wherein Elite Syngenta soybean lines (RM 3.7 to 4.8) are used as the females (pollen recipients) and the recited accession line of Glycine tomentella is used as the males or pollen donors. Next, flowers are selected from the glycine plant containing anthers at the proper developmental stage. New, fully opened, brightly colored flowers hold anthers with mature pollen. The pollen appears as loose, yellow dust. These flowers are removed from the glycine plant and taken to the soybean plant for pollination. Pollen from the Glycine plants is generally used within 30 minutes of flower removal. Soybean flower buds that are ready for pollination are identified and selected. A soybean flower bud is generally ready when it is larger in size when compared to an immature bud. The sepals of the soybean blossoms are lighter in color and the petals are just beginning to appear. First, a pair of fine-tipped tweezers are used to carefully detach the sepals from the flower bud to expose the outer set of petals. Then, gently grasping and removing the petals (5 in total) from the flower, the ring of stamens surrounding the pistil is exposed. Since the stigma is receptive to pollen 1 day before the anthers begin shedding pollen it is important to recognize the stage development of “female ready, male not ready”. When pollinating soybean flowers at this developmental stage it is not necessary to emasculate the female flower. Next, the stigma is located on the soybean flower. Then using 1 male flower, the petals are carefully peeled off to expose the anthers and the pollen grains are gently dusted onto the stigma of the soybean flower. Care is taken not to damage the stigma at any time during this process. Starting the day after pollination, a hormone mixture is sprayed onto the pollinated flower and eventual developing F1 pod one time every day until harvest. The pollinated flower or pod is saturated with a light mist of the hormone mixture, taking care not to cause the flower/pod to prematurely detach from the plant. The mixture contains 100 mg GA3, 25 mg NAA and 5 mg kinetin/L distilled water. These hormones aid in the retention of the developing pod and in increased pod growth.

[0287] Pods from wide crosses are harvested at approximately 14 to 16 days post pollination. Before selecting an individual pod to harvest, it is verified that the sepals were removed (to indicate a wide cross attempt) and that the seed size is as expected for a wide cross. Pods are collected and counted according to wide cross combination to determine crossing success. The average crossing success may be approximately 40%. The wide cross pods can contain 1 to 3 seeds but generally 2 seeds are found in each F1 pod.

[0288] Harvested pods are collected and brought back to the lab to be sterilized. The pods are first rinsed with 70% EtOH for 2 to 3 minutes and then placed in 10% Clorox bleach for an additional 30 minutes on a platform shaker at approximately 130 RPM. Finally, the pods are rinsed multiple times with sterile water to remove any residual bleach. Embryo isolation can begin immediately following pod sterilization or pods can be stored at 4° C. for up to 24 hours prior to embryo isolation. The sterilized pods are next taken to a laminar flow hood where the embryos can be rescued. Individual pods are placed in a sterile petri dish and opened using a scalpel and forceps. An incision is made along the length of the wide cross pod away from the seed. The pod can then be easily opened to expose the seed. Alternatively, two pair of forceps can be used to separate the pod shell. The seed is carefully removed from the pod and placed in a sterile petri dish under the dissection microscope. Very fine forceps are used to isolate the embryo from the seed. With forceps in one hand, the side of the seed away from the embryo is gently held, with hilum facing up. Using another pair of forceps in the other hand, the seed coat is removed from the side of the seed containing the embryo. The membrane surrounding the embryo is peeled off and the embryo is pushed up from the bottom side. Embryos should be past the globular developmental stage and preferably past the early heart developmental stage (middle to late heart stage, cotyledon stage and early maturation stage embryos are desired). Isolated embryos are transferred to embryo rescue medium. Embryos can be treated to induce chromosome doubling at this time. (See below for chromosome doubling details.) Isolated embryos remain on embryo rescue medium for 21 to 30 days at 24° C. Embryos may remain in the dark for the entire incubation on the embryo rescue medium, may begin the incubation in the dark and complete it in the light, or may spend the entire incubation in the light. There is not a callus induction stage in this protocol. Shoots are developed directly from the embryos.

[0289] Either colchicine or trifluralin (both, Sigma-Aldrich, St. Louis, MO) can be used to induce chromosome doubling. Ideally, late heart stage wide cross embryos (or larger) are chemically treated to induce chromosome doubling at any time from immediately following isolation up to 1 week post isolation. The doubling agent can be mixed in either solid or liquid medium and applied for several hours or up to a few days. Trifluralin is used at a concentration of 10-40 uM in either solid or liquid media. Additionally, colchicine is used at a concentration of 0.4-1 mg/ml in either solid or liquid media. Following the chemical treatment, the embryos are transferred to fresh embryo rescue medium.

[0290] Developing embryos are transferred from rescue medium to germination medium such as Soy ER GSMv2 (i.e. 3.1 g B5 basal salt, Gamborg's, 1 ml B5 vitamins 1000×, 40 g sucrose [C12H22O11], 0.25 g casein hydrolysate, 0.25 ml BAP, 0.75 g MgCl2*6H20, 20 ml glutamine 25 mg/ml, 0.1 g serine [C3H7NO3], 4 ml Asparagine 25 mg/ml and 0.05 ml of IBA 1 mg/ml) for approximately 3 to 5 weeks in the light at 24° C. Alternatively, developing embryos may be transferred from rescue medium to elongation medium such as Soy E1 0 No TCV (i.e., 4.3 g MS Basal salt Mixture [MSPO1], 5 ml MS iron 200×, 30 g Sucrose [C12H22011], 1 g MES [C6H13NO4S], 8 g purified agar, 1 ml B5 vitamins 100×, 2 ml glutamine 25 mg/ml, 0.50 ml zeatin riboside, trans isomers 1 mg/ml, 0.1 ml IAA 1 mg/ml, 0.2 ml GA3 5 mg/ml, 1.5 ml timentin 100 mg/ml, 0.3 ml cefotaxime 250 mg/ml, 0.5 ml vancomycin 100 mg/ml) for approximately 3 to 5 weeks in the light at 24° C. Developing shoots may be transferred from media plates to Phytocons (PhytoTechnology Laboratories, Lenexa, KS) containing either germination or elongation medium for further shoot development. Established shoots are moved to soil. Initial plant care is critical for survival of these shoots.

[0291] Ploidy analysis is conducted using a flow cytometer. Leaf tissue for ploidy analysis is collected from small shoots either in culture or after establishment in soil. Tissue is collected on dry ice and stored at −80° C. until analysis or collected on wet ice and analyzed the same day. A sample size of 0.5 cm² is sufficient. Samples are prepared according to standard techniques. Each sample set contains an untreated F1 plant (not treated to induce chromosome doubling) as a control.

[0292] The method described above results in a significantly higher wide cross success rate than is reported in literature. Further, no emasculation of female flowers is required, which saves time and reduces risk of damage to the stigma.

### Example 4: Identification of Candidate R-Genes within the Identified Chromosomal Interval

[0293] Further genotyping of the G. tomentella chromosomal interval (SEQ ID NO: 1) led to the discovery of three potential causative genes for ASR resistance (herein also referred to as the candidate R-genes) located on chromosome 3 within the disclosed interval. Associations between each of the candidate genes and ASR resistance was validated and the efficacy of each of the genes in conferring ASR resistance was assessed.

[0294] One of the genes, herein also referred to as “GtoRG30”, encodes an R-gene with a TNL motif (SEQ ID NOS: 2-4). The sequence of the polypeptide encoded by the R-gene is depicted at SEQ ID NO: 5. The native promoter for this gene is provided at SEQ ID NO: 15. Details regarding the validation and efficacy of the R-gene is provided at Examples 6, 8 and FIGS. 3-5 and 9-10.

[0295] Additionally, two other R genes encoding a CNL motif were identified, as depicted at SEQ ID NOs: 6 and 7. Both these R-genes were validated.

[0296] It is contemplated that the R-genes of the present invention, or variants, fragments, homologs or orthologs thereof, can be employed in a transgenic, gene editing, or breeding method utilizing embryo rescue, tetraploid soy, or other introgression methods, as described above, to generate plants having increased resistance to fungal pathogens including ASR. Additionally, or optionally, nucleic acid molecules comprising the R-gene coding sequence of the present invention (e.g., any of SEQ ID NOS: 2-4, 11-12), or nucleic acid molecules with a nucleotide sequence substantially identical to the R-gene coding sequence of the present invention (e.g., SEQ ID NOs: 2-4, 11-12), or nucleic acid molecules comprising a nucleotide sequence encoding a polypeptide having the amino acid sequence of SEQ ID NO: 5, or a polypeptide having an amino acid sequence substantially identical to SEQ ID NO: 5, can be employed in a transgenic, gene editing, or breeding method utilizing embryo rescue, tetraploid soy, or other introgression methods, as described above to generate pathogen resistant (e.g., ASR resistant) plants.

[0297] Given the sequence of the R-gene and the associated trait (e.g. ASR resistance), oligonucleotide primers can be developed and use said primers to identify plants carrying the gene with the nucleotide sequence depicted in SEQ ID NOs: 2-4, 11-12. A TAQMAN® assay (e.g. generally a two-step allelic discrimination assay or similar), a KASP™ assay (generally a one-step allelic discrimination assay defined below or similar), or both can be employed to assay the genes. In an exemplary two-step assay, a primer pair comprising a forward primer and a reverse primer are employed to amplify the gene, or a functional part thereof, associated with conferring ASR resistance. Further, an assay probe (or hybridization oligo) can be employed with the primer pair to detect a target sequence present in the amplified gene. The probe may be labeled with, for example, fluorophores to permit easy detection. Further, the probes may include a minor groove binder (MGB) moiety at the 3′ end that increases the melting temperature (Tm) of the probe and stabilizes probe-target hybrids. This allows the length of the probe to be shortened while still providing sequence discrimination and flexibility to accommodate the target. Further, the probe can include a nonfluorescent quencher (NFQ) to absorb (quench) signal from the fluorescent dye label at the other end of the probe, reducing background noise and improving sensitivity of the probe. In some embodiments, the assay primers and the reaction conditions are designed such that an assay primer will only hybridize to the reverse complement of a 100% perfectly matched sequence, thereby permitting detection of the gene based upon detection of hybridizations.

[0298] As a non-limiting example, presence of a nucleic acid molecule comprising the R-gene sequence of any of SEQ ID NOs: 2-4, 11-12 or a sequence having at least 90% sequence identity, at least 95% sequence identity, or at least 99% sequence identity to any of SEQ ID NO: 2-4, 11-12; or a nucleotide sequence encoding the protein of SEQ ID NO: 5 or encoding a protein having at least 90% sequence identity, at least 95% sequence identity, or at least 99% sequence identity to SEQ ID NO: 5, can be detected by generating an amplicon using the primer pair of SEQ ID NOs: 8-9 and/or detected using the probe sequence of SEQ ID NO: 10, the probe comprising a FAM fluorophore at the 5′-end and an MGB and NFQ moiety at the 3′-end. In one example, presence of the R-gene, or a functional part thereof, in a disease resistant plant (e.g., ASR resistant soybean plant) may be identified by isolating nucleic acid molecules from said plant and generating an amplicon comprising at least a portion of the R-gene using the above-mentioned primers and/or probes.

[0299] In still further examples, presence of a nucleic acid molecule comprising the R-gene sequence of any of SEQ ID NOs: 2-4, 11-12 or a sequence having at least 90% sequence identity, at least 95% sequence identity, or at least 99% sequence identity to any of SEQ ID NO: 2-4, 11-12 or a nucleotide sequence encoding the protein of SEQ ID NO: 5 or encoding a protein having at least 90% sequence identity, at least 95% sequence identity, or at least 99% sequence identity to SEQ ID NO: 5, can be determined by detecting for the presence of the R-protein encoded by the R-gene. For example, presence of the R-gene, or a functional part thereof, in a disease resistant plant (e.g., ASR resistant soybean plant) can be determined by isolating proteins from said plant and detecting the presence of a protein encoded by the R-gene (such as a protein having the polypeptide sequence of SEQ ID NO: 5, or at least 90% sequence identity to SEQ ID NO: 5) using commonly known protein detection assays (e.g., Western blot, ELISA, radioimmunoassay, etc.).

[0300] In still further examples, presence of a nucleic acid molecule comprising the R-gene sequence of any of SEQ ID NOs: 2-4, 11-12 or a sequence having at least 90% sequence identity, at least 95% sequence identity, or at least 99% sequence identity to any of SEQ ID NO: 2-4, 11-12; or a nucleotide sequence encoding the protein of SEQ ID NO: 5 or encoding a protein having at least 90% sequence identity, at least 95% sequence identity, or at least 99% sequence identity to SEQ ID NO: 5, can be detected by generating an amplicon using a primer pair comprising a forward primer and a reverse primer selected from the primers of Tables 5-6, and detected using a probe selected from the probes of Tables 5-6.

### Example 5: Construction of Vectors comprising R-Genes and Transformation

[0301] DNA constructs, particularly vectors, were generated comprising the R-gene operably coupled to a heterologous promoter. The nucleotide sequence of the R-gene used in the vectors comprised genomic DNA sequences or coding sequences for the R-gene, herein also referred to as “GtoRG30” and previously described in Example 4 (SEQ ID NOS: 2-4, 11-12). The DNA constructs comprise the R-gene coding sequence operably linked to a heterologous promoter capable of enabling expression of the R-gene in a plant cell. In a first set of constructs, transcription of R-gene GtoRG30 was driven by Medicago truncatula promoter prMt12344. In a second set of constructs, transcription of R-gene GtoRG30 was driven by Medicago truncatula promoter prMt51186. In a third set of constructs, transcription of R-gene GtoRG30 was driven by a native promoter (RG30_promoter). Binary vectors created comprising R-gene GtoRG30 are listed in Table 7.

TABLE 7
Constructs created using the identified novel R-gene

| | | | R-gene sequence |
|---|---|---|---|
| Construct ID | Promoter used | Terminator used | used |
| 25845 | prMt12344 | tMt12344 | gGtoRG30-02 |
| | (SEQ ID NO: 13) | (SEQ ID NO: 16) | (SEQ ID NO: 3) |
| 25899 | prMt51186 | prMt51186 | gGtoRG30-02 |
| | (SEQ ID NO: 14) | (SEQ ID NO: 17) | (SEQ ID NO: 3) |
| 25992 | prMt12344 | tMt12344 | cGtoRG30-01 |
| | (SEQ ID NO: 13) | (SEQ ID NO: 16) | (SEQ ID NO: 4) |
| 26015 | prMt51186 | tMt51186 | cGtoRG30-01 |
| | (SEQ ID NO: 14) | (SEQ ID NO: 17) | (SEQ ID NO: 4) |
| 25950 | Native | Native | gGtoRG30-02 |
| | RG30_promoter | RG30_terminator | (SEQ ID NO: 11) |
| | (SEQ ID NO: 15) | (SEQ ID NO: 18) | |

[0302] a) 25845 Vector Construction for R-Gene Comprising SEQ ID NO: 3

[0303] FIG. 1 provides an illustration of vector 25845 for an R-gene comprising SEQ ID NO: 3. Features are described below.
[0304] Vector type: Binary Vector
[0305] Construct Size (bp): 30,982

[0306] Functional description: A binary vector for soybean transformation with the ALS selection harboring a soy rust resistance candidate gene, gGtoRG30-02 from chr3b of PI_505267 (G. tomentella), encoding a protein containing toll/interleukin receptor-1 (TIR), nucleotide-binding site (NBS), and leucine rich repeat (LRR) domains. This resistance gene includes its native 5′UTR and 3′UTR and the coding sequence cGtoRG30-01. The first native intron was replaced with Arabidopsis intron. This resistance gene is driven by the Medicago truncatula promoter, prMt12344-02 and corresponding terminator, tMt12344-01. Vector also contains the ALS selection cassette prGmEF-05/cNtALS-01/tGmEPSPS-04.

[0307] Features:

[0308] oVS1. Start: 19359 End: 19763. Origin of replication in Agrobacterium tumefaciens host.

[0309] cRepA. Start: 18243 End: 19316. cRepA-01 with A to G at nt735.

[0310] cVirG. Start: 17488 End: 18213. virG (putative) from pAD1289 with TTG start codon. virGN54D came from pAD1289 described in Hansen et al. 1994, PNAS 91:7603-7607.

[0311] prVirG. Start: 17283 End: 17413. virG promoter (Winans J. Bact. 172:2433-38 (1990)) composed of two promoter elements, one responsive to acetosyringone and phosphate-starvation (bp 45 to 83) and another to medium acidification (86 to 128).

[0312] cSpec. Start: 16400 End: 17188. Also called aadA; gene encoding the enzyme aminoglycoside 3′adenyltransferase that confers resistance to spectinomycin and streptomycin for maintenance of the vector in E. coli and Agrobacterium.

[0313] bNLB. Start: 16026 End: 16050. 25 bp Left border repeat region of T-DNA of Agrobacterium tumefaciens nopaline ti-plasmid.

[0314] bNLB. Start: 15991 End: 16120. Left border region of T-DNA of Agrobacterium tumefaciens nopaline ti-plasmid.

[0315] xTAG. Start: 15943 End: 15982. 40 bp site for plant insert intactness testing and to stop readthrough ORFs.

[0316] xSTOPS Start: 15931 End: 15942. 6-frame stop to minimize unintended ORF read-through.

[0317] xSTOPS Start: 15855 End: 15866. 6-frame stop to minimize unintended ORF read-through.

[0318] tGmEPSPS Start: 15057 End: 15854. An EPSPS terminator from Glycine max.

[0319] cNtALS Start: 13056 End: 15050. The NtALS DNA fragment encodes an Acetolactate synthase (ALS) double mutant (P191A, W568L) from Nicotiana tabacum. It was codon-optimized for soybean expression.

[0320] u5GmEF Start: 13037 End: 13047. Second 5′ UTR of the soybean elongation factor (EF) gene.

[0321] iGmEFStart: 12128 End: 13036. The first intron of the soybean elongation factor (EF) gene. iGmEF-01 with an internal BamHI site and a 3′ end unintended ORF removed.

[0322] u5GmEF Start: 12065 End: 12127. First 5′ UTR of the soybean elongation factor (EF) gene.

[0323] start Start: 12065 End: 12065. Transcription start site.

[0324] prGmEF Start: 10982 End: 13047. Translation elongation factor EF-1 alpha/Tu promoter, including the first intron and neighboring UTR, from soybean (williams 82).

[0325] xSTOPS Start: 10970 End: 10981. 6-frame stop to minimize unintended ORF read-through.

[0326] tMt12344 Start: 9956 End: 10962. The terminator based on the Medicago truncatula gene. It consists of the 3′-UTR and 3′-non-transcribed sequence.

[0327] gGtoRG30-02 Start: 2231 End: 9955. A genomic fragment containing a soy R-gene (SEQ ID NO: 3) along with its native 5′UTR and 3′UTR that encodes a protein containing toll/interleukin receptor-1 (TIR), nucleotide-binding site (NBS), and leucine rich repeat (LRR) domains. The first native intron was replaced with the Arabidopsis intron, iAtBAF60-01. The genomic fragment comprises the following components: RG30_5′UTR Start: 2231; End: 2730; RG30_3′UTR Start: 9318 End: 9955; intron4 Start: 7094 End: 8693; intron3 Start: 5401 End: 6262; intron2 Start: 4877 End: 5124; iAtBAF60-01 Start: 3357 End: 3765; Intron of Arabidopsis thaliana BAF60 homolog (CHC1 by the Chromatin database) inserted in GUS coding sequence to prevent bacterial expression; cGtoRG30-01 Start: 2731 End: 9317; the CDS from the R-gene. The coding sequence comprises (with reference to SEQ ID NO: 3):

| | | |
|---|---|---|
| gGtoRG30-02 | 1 | 7,725 |
| RG30_3′UTR | 7,088 | 7,725 |
| intron4 | 4,864 | 6,463 |
| intron3 | 3,171 | 4,032 |
| intron2 | 2,647 | 2,894 |
| iAtBAF60-01 | 1,127 | 1,535 |
| cGtoRG30-01 (CDS) | 501 | 7,087 |
| RG30_5′UTR | 1 | 500 |

[0328] start Start: 2043 End: 2043 The transcription start site based on cDNA/gDNA alignment.

[0329] prMt12344 Start: 217 End: 2218 The promoter from the Medicago truncatula gene. It consists of 5′-non-transcribed sequence and the 5′ UTR.

[0330] xSTOPS Start: 184 End: 195 6-frame stop to minimize unintended ORF read-through

[0331] xTAG Start: 144 End: 183 40 bp site for plant insert intactness testing and to stop readthrough ORFs.

[0332] bNRB-01 Start: 101 End: 125 Right Border Repeat

[0333] bNRB-04 Start: 4 End: 143 Right border region of T-DNA of Agrobacterium tumefaciens nopaline ti-plasmid.

[0334] b) 25899 Vector Construction for R-Gene Comprising SEQ ID NO: 3

[0335] FIG. 2 provides an illustration of vector 25899 for an R-gene comprising SEQ ID NO: 4. Features are described below.

[0336] oCOLE Start: 20,955 End: 21,761 The ColE1 origin of replication functional in E. coli derived from pUC19.

[0337] oVS1 Start: 19,873 End: origin of replication in Agrobacterium tumefaciens host.

[0338] cRepA Start: 18,757 End: 19,830 cRepA with A to G at nt735.

[0339] cVirG Start: 18,002 End: 18,727 virG (putative) from pAD1289 with TTG start codon. virGN54D came from pAD1289 described in Hansen et al. 1994, PNAS 91:7603-7607.

[0340] prVirGStart: 17,797 End: 17,927 virG promoter (Winans J. Bact. 172:2433-38 (1990)) composed of two promoter elements, one responsive to acetosyringone and phosphate-starvation (bp 45 to 83) and another to medium acidification (86 to 128).

[0341] cSpec Start: 16,914 End: 17,702 Also called aadA; gene encoding the enzyme aminoglycoside 3′adenyltransferase that confers resistance to spectinomycin and streptomycin for maintenance of the vector in E. coli and Agrobacterium.

[0342] bNLB Start: 16,540 End: 16,564 25 bp Left border repeat region of T-DNA of Agrobacterium tumefaciens nopaline ti-plasmid.

[0343] bNLB Start: 16,505 End: 16,634 Left border region of T-DNA of Agrobacterium tumefaciens nopaline ti-plasmid.

[0344] xTAG Start: 16,457 End: 16,496 40 bp site for plant insert intactness testing and to stop readthrough ORFs.

[0345] xSTOPS Start: 16,445 End: 16,456 6-frame stop to minimize unintended ORF read-through.

[0346] xSTOPS Start: 16,369 End: 16,380 6-frame stop to minimize unintended ORF read-through.

[0347] tGmEPSPS Start: 15,571 End: 16,368 An EPSPS terminator from Glycine max. Removal of 6 frame stops at 3′ end of terminator.

[0348] cNtALS Start: 13,570 End: 15,564 The NtALS DNA fragment encodes an Acetolactate synthase (ALS) double mutant (P191A, W568L) from Nicotiana tabacum. It was codon-optimized for soybean expression and synthesized by GeneArt.

[0349] u5GmEF Start: 13,551 End: 13,561 Second 5′ UTR of the soybean elongation factor (EF) gene.

[0350] iGmEF Start: 12,642 End: 13,550 The first intron of the soybean elongation factor (EF) gene.

[0351] u5GmEF Start: 12,579 End: 12,641 First 5′ UTR of the soybean elongation factor (EF) gene.

[0352] start Start: 12,579 End: 12,579 transcription start site.

[0353] prGmEF Start: 11,496 End: 13,561 Translation elongation factor EF-1 alpha/Tu promoter, including the first intron and neighboring UTR, from soybean (williams 82).

[0354] xSTOPS Start: 11,484 End: 11,495 6-frame stop to minimize unintended ORF read-through.

[0355] xSTOPS Start: 11,465 End: 11,476 6-frame stop to minimize unintended ORF read-through.

[0356] tMt51186 Start: 10,465 End: 11,464 Modified terminator of Medicago truncatula gene.

[0357] gGtoRG30-02 (SEQ ID NO: 3) Start: 2,734 End: 10,458; A genomic fragment containing a soy R-gene along with its native 5′UTR and 3′UTR that encodes a protein containing toll/interleukin receptor-1 (TIR), nucleotide-binding site (NBS), and leucine rich repeat (LRR) domains. The first native intron was replaced with the Arabidopsis intron, iAtBAF60-01. The genomic fragment comprises the following components: RG30_5′UTR Start: 2,734 End: 3,233; RG30_3′UTR Start: 9,821 End: 10,458; intron4 Start: 7,597 End: 9,196; intron3 Start: 5,904 End: 6,765; intron2 Start: 5,380 End: 5,627; iAtBAF60-01 Start: 3,860 End: 4,268; intron of Arabidopsis thaliana BAF60 homolog (CHC1 by the Chromatin database) inserted in GUS coding sequence to prevent bacterial expression; cGtoRG30-01 Start: 3,234 End: 9,820; the CDS of the R-gene.

[0358] iMt51186 Start: 2,450 End: 2,700 The first intron of the Medicago truncatula gene.

[0359] start Start: 2,313 End: 2,313 Transcription start based on cDNA/gDNA alignment.

[0360] prMt51186 Start: 217 End: 2,721 The promoter from the Medicago truncatula gene.

[0361] xSTOPS Start: 184 End: 195 6-frame stop to minimize unintended ORF read-through.

[0362] xTAG Start: 144 End: 183 40 bp site for plant insert intactness testing and to stop readthrough ORFs.

[0363] bNRB Start: 101 End: 125 Right Border Repeat

[0364] bNRB-04 Start: 4 End: 143 Right border region of T-DNA of Agrobacterium tumefaciens nopaline ti-plasmid. Differs from bNRB-03 by 20 bp at 5′ end.

[0365] c) 25950 Vector Construction for R-Gene Comprising SEQ ID NO: 11

[0366] FIG. 8 provides an illustration of vector 29590 for an R-gene comprising SEQ ID NO: 11. Features are described below.

[0367] Vector type: Binary Vector

[0368] Construct Size (bp): 20,738

[0369] Functional description: A binary vector for soybean transformation with the ALS selection harboring a soy rust resistance candidate gene, gGtoRG30-01 encoding a protein containing toll/interleukin receptor-1 (TIR), nucleotide-binding site (NBS), and leucine rich repeat (LRR) domains. The first native intron was replaced with Arabidopsis intron. Vector also contains the ALS selection cassette prGmEF-05/cNtALS-01/tGmEPSPS-04.

[0370] Features:

[0371] xTAG Start: 144 End: 183 40 bp site for plant insert intactness testing and to stop readthrough ORFs.

[0372] xTAG Start: 15,422 End: 15,461 40 bp site for plant insert intactness testing and to stop readthrough ORFs.

[0373] xSTOPS Start: 15,410 End: 15,421 6-frame stop to minimize unintended ORF read-through

[0374] xSTOPS Start: 15,334 End: 15,345 6-frame stop to minimize unintended ORF read-through

[0375] xSTOPS Start: 10,449 End: 10,460 6-frame stop to minimize unintended ORF read-through

[0376] xSTOPS Start: 184 End: 195 6-frame stop to minimize unintended ORF read-through

[0377] prGmEF Start: 12,516 End: 12,526 Translation elongation factor EF-1 alpha/Tu promoter, including the first intron and neighboring UTR, from soybean (williams 82).

[0378] prGmEF Start: 11,544 End: 11,606 Translation elongation factor EF-1 alpha/Tu promoter, including the first intron and neighboring UTR, from soybean (williams 82).

[0379] tGmEPSPS Start: 15,536 End: 15,333 An EPSPS terminator from Glycine max.

[0380] gGtoRG30-01 Start: 8,804 End: 10,441 A genomic fragment containing a soy rust resistance candidate gene that encodes a protein containing toll/interleukin receptor-1 (TIR), nucleotide-binding site (NBS), and leucine rich repeat (LRR) domains. The first native intron was replaced with Arabidopsis intron, iAtBAF60-01. The coding sequence comprises (with reference to SEQ ID NO: 11):

| | | |
|---|---|---|
| gGtoRG30-01 loci | 1 | 10,158 |
| RG30_3′UTR | 8,521 | 9,158 |
| RG30_terminator | 8,521 | 10,158 |
| intron4 | 6,297 | 7,896 |
| intron3 | 4,604 | 5,465 |
| intron2 | 4,080 | 4,327 |
| iAtBAF60-01 | 2,560 | 2,968 |
| cGtoRG30 (CDS) | 1,934 | 8,520 |
| RG30_5′UTR | 1,434 | 1,933 |
| RG30_promoter | 1 | 1,933 |

[0381] prVirG Start: 16,762 End: 16,892 virG promoter (Winans J. Bact. 172:2433-38 (1990)) composed of two promoter elements, one responsive to acetosyringone and phosphate-starvation (bp 45 to 83) and another to medium acidification (86 to 128)

[0382] prGmEF Start: 10,461 End: 12,526 Translation elongation factor EF-1 alpha/Tu promoter, including the first intron and neighboring UTR, from soybean (williams 82).

[0383] oVS1 Start: 18,838 End: 19,242 origin of replication in Agrobacterium tumefaciens host

[0384] oCOLE Start: 20,726 End: 19,920 The ColE1 origin of replication functional in E. coli

[0385] prGmEF-05 Start: 11,607 End: 12,515 Translation elongation factor EF-1 alpha/Tu promoter, including the first intron and neighboring UTR, from soybean (williams 82).

[0386] iAtBAF60 Start: 2,843 End: 3,251 intron of Arabidopsis thaliana BAF60 homolog (CHC1 by the Chromatin database) inserted to prevent bacterial expression</nobr></html>

[0387] cVirG Start: 16,967 End: 17,692 virG from pAD1289 with TTG start codon described in Hansen et al. 1994, PNAS 91:7603-7607

[0388] cSpec Start: 15,879 End: 16,667 gene encoding the enzyme aminoglycoside 3′adenyltransferase that confers resistance to spectinomycin and streptomycin for maintenance of the vector in E. coli and Agrobacterium.

[0389] cRepA Start: 17,722 End: 18,795 cRepA-01 with A to G at nt735

[0390] cNtALS Start: 12,535 End: 14,529 encodes an Acetolactate synthase double mutant from Nicotiana tabacum that was codon-optimized for soybean expression

[0391] bNRB Start: 125 End: 101 Right border region of T-DNA of Agrobacterium tumefaciens nopaline ti-plasmid

[0392] bNLB Start: 15,529 End: 15,505 Left border repeat region of T-DNA of Agrobacterium tumefaciens nopaline ti-plasmid

[0393] Each of the constructs was transformed into soybean cells using known methods of plant transformation (e.g., via Agrobacterium mediated transformation) to create primary soybean events.

### Example 6: Validation of R-Genes Against ASR

[0394] In the phenotyping work, both symptom evaluation and molecular assays for rust resistance or susceptibility ratings have been used. The symptom evaluation is a modified version of a rust rating scale from Burdon and Speer (Euphytica, 33: 891-896, 1984; also T A G 1984). The molecular assay is based on a fungal housekeeping gene, β-tubulin, wherein the probe for β-tubulin targets a specific region in soy rust but not in other pathogens or plant species. Further, the molecular assay was validated by coupling with phenotypic symptomatic observations, as shown in FIGS. 3-4 and 9.

[0395] FIG. 3 compares leaves from primary soybean events generated from transformation of binary construct 24845 (TO event GVG01375963) and binary construct 25899 (TO event GVG013773804) with leaves from a control. FIG. 9 compares leaves from primary soybean events generated from binary construct 25950 (TO events GVG01740892 and GVG01740893) with leaves from a control. FIG. 4 shows the Disease resistance ratings of the primary soybean events relative to the control. The control has the same genetic background without the transgene.

[0396] Leaves from primary events were placed in a petri dish on moist paper towel and then inoculated with a soybean rust spore suspension from three different rust populations (RTP1; BRO1—Brazil; BRO3—Brazil). Leaves from plants that had the same genetic background but did not have the transgene served as negative controls. After 14 days, leaves from both events and the control were evaluated for resistance to soybean rust. As shown in FIGS. 3, 4 and 9, the leaves from T0 events show clear evidence of resistance to soybean rust compared to the wild type control. The T0 event leaves show the presence of reddish-brown lesions (first two panels on each row) while leaves from the control (last panel on each row) show tan reaction and are heavily sporulating, thus indicating that the novel R-gene confers resistance to ASR.

[0397] The results in FIGS. 3 and 9 are shown using the standard soy rust rating scale with RB types indicative of the event being resistant and Tan ratings indicative of the event being susceptible. Numbers listed after the RB are a rating of combination of density of lesions or size of the lesions with 1-4 scale from high to intermediate resistance, with no sporulation (NSP) or very little sporulation (SPL). Numbers listed after Tan is a rating of combination of density of pustules and level of sporulation with 1-5 scale from low to high sporulation levels. As can be seen from the difference in ratings, the TO events repeatedly shows high level of disease resistance compared to the control.

[0398] Quantitative measurements taken using fungal β-tubulin transcripts are consistent with these phenotypic observations, as shown in the graph of FIGS. 5 and 10. The level of resistance was measured molecularly with fungal β-tubulin via qRT-PCR on the event and control. The event comprising the TNL R-gene showed a high level of resistance with more than 90% reduction in fungal biomass as compared to the control. The average qRT value for the control is about 981, while the average qRT value for the event is about 79. The data also shows that the identified TNL R-gene is expressed in the assayed events.

[0399] In this validation, we demonstrated that construct 25845 and construct 25950 show strong resistance (>90%) and broad spectrum against all rusts tested.

### Example 7: Additional Vector Construction Examples

[0400] Additional vector constructs are also provided by way of example.

[0401] d) 25992 Vector Construction for R-Gene Comprising SEQ ID NO: 4

[0402] FIG. 6 provides an illustration of vector 25992 for an R-gene comprising SEQ ID NO: 4. Features are described below.

[0403] oCOLE Start: 19,303 End: 20,109. The ColE1 origin of replication functional in E. coli.

[0404] oVS1 Start: 18,221 End: 18,625. Origin of replication in Agrobacterium tumefaciens host.

[0405] cRepA Start: 17,105 End: 18,178. cRepA-01 with A to G at nt735.

[0406] cVirG Start: 16,350 End: 17,075. virG (putative) from pAD1289 with TTG start codon. virGN54D came from pAD1289 described in Hansen et al. 1994, PNAS 91:7603-7607.

[0407] prVirG Start: 16,145 End: 16,275. virG promoter (Winans J. Bact. 172:2433-38 (1990)) composed of two promoter elements, one responsive to acetosyringone and phosphate-starvation (bp 45 to 83) and another to medium acidification (86 to 128).

[0408] cSpec Start: 15,262 End: 16,050. Also called aadA; gene encoding the enzyme aminoglycoside 3′adenyltransferase that confers resistance to spectinomycin and streptomycin for maintenance of the vector in E. coli and Agrobacterium.

[0409] bNLB Start: 14,888 End: 14,912 25 bp. Left border repeat region of T-DNA of Agrobacterium tumefaciens nopaline ti-plasmid.

[0410] bNLB Start: 14,853 End: 14,982. Left border region of T-DNA of Agrobacterium tumefaciens nopaline ti-plasmid.

[0411] xTAG Start: 14,805 End: 14,844. 40 bp site for plant insert intactness testing and to stop readthrough ORFs.

[0412] xSTOPS Start: 14,793 End: 14,804. 6-frame stop to minimize unintended ORF read-through.

[0413] xSTOPS Start: 14,717 End: 14,728. 6-frame stop to minimize unintended ORF read-through.

[0414] tGmEPSPS Start: 13,919 End: 14,716. Modified version of tGMEPS-02; an EPSPS terminator from Glycine max.

[0415] cNtALS Start: 11,918 End: 13,912. The NtALS DNA fragment encodes an Acetolactate synthase double mutant (P191A, W568L) from Nicotiana tabacum. It was codon-optimized for soybean expression.

[0416] u5GmEF Start: 11,899 End: 11,909. Second 5′ UTR of the soybean elongation factor (EF) gene.

[0417] iGmEFStart: 10,990 End: 11,898. The first intron of the soybean elongation factor (EF) gene.

[0418] u5GmEF Start: 10,927 End: 10,989. First 5′ UTR of the soybean elongation factor (EF) gene.

[0419] start Start: 10,927 End: 10,927. Transcription start site

[0420] prGmEF Start: 9,844 End: 11,909. Translation elongation factor EF-1 alpha/Tu promoter, including the first intron and neighboring UTR, from soybean (williams 82).

[0421] xSTOPS Start: 9,832 End: 9,843. 6-frame stop to minimize unintended ORF read-through.

[0422] tMt12344 Start: 8,818 End: 9,824. The terminator based on the Medicago truncatula gene.

[0423] It consists of the 3′-UTR and 3′-non-transcribed sequence.

| | |
|---|---|
| intron4 Start: 6,594 | End: 8,193 |
| intron3 Start: 4,901 | End: 5,762 |
| intron2 Start: 4,377 | End: 4,624 |

[0424] iAtBAF60 Start: 2,857 End: 3,265. Intron of Arabidopsis thaliana BAF60 homolog inserted in GUS coding sequence to prevent bacterial expression.

[0425] cGtoRG30 (SEQ ID NO: 4) Start: 2,231 End: 8,817. A CDS of soy R-gene that encodes a protein containing toll/interleukin receptor-1 (TIR), nucleotide-binding site (NBS), and leucine rich repeat (LRR) domains. This CDS is from an R-gene on Chromosome 3 of G. tomentella P1 505267.

[0426] start Start: 2,043 End: 2,043. The transcription start site based on cDNA/gDNA alignment.

[0427] prMt12344 Start: 217 End: 2,218. The promoter from the Medicago truncatula gene. It consists of 5′-non-transcribed sequence and the 5′ UTR.

[0428] xSTOPS Start: 184 End: 195. 6-frame stop to minimize unintended ORF read-through.

[0429] xTAG Start: 144 End: 183. 40 bp site for plant insert intactness testing and to stop readthrough ORFs. Typically, by agro RB. 1 bp different than −01.

[0430] bNRB Start: 101 End: 125. Right Border Repeat.

[0431] bNRB Start: 4 End: 143. Right border region of T-DNA of Agrobacterium tumefaciens nopaline ti-plasmid.

[0432] e) 26015 Vector Construction for R-Gene Comprising SEQ ID NO: 4

[0433] FIG. 7 provides an illustration of vector 26015 for an R-gene comprising SEQ ID NO: 4. Features are described below.

[0434] oCOLE Start: 19,817 End: 20,623. The ColE1 origin of replication functional in E. coli.

[0435] oVS1 Start: 18,735 End: 19,139. Origin of replication in Agrobacterium tumefaciens host.

[0436] cRepA Start: 17,619 End: 18,692. cRepA-01 with A to G at nt735.

[0437] cVirG Start: 16,864 End: 17,589. virG (putative) from pAD1289 with TTG start codon. virGN54D came from pAD1289 described in Hansen et al. 1994, PNAS 91:7603-7607.

[0438] prVirGStart: 16,659 End: 16,789. virG promoter (Winans J. Bact. 172:2433-38 (1990)) composed of two promoter elements, one responsive to acetosyringone and phosphate-starvation (bp 45 to 83) and another to medium acidification (86 to 128).

[0439] cSpec Start: 15,776 End: 16,564. Also called aadA; gene encoding the enzyme aminoglycoside 3′adenyltransferase that confers resistance to spectinomycin and streptomycin for maintenance of the vector in E. coli and Agrobacterium.

[0440] bNLB Start: 15,402 End: 15,426 25 bp Left border repeat region of T-DNA of Agrobacterium tumefaciens nopaline ti-plasmid

[0441] bNLB Start: 15,367 End: 15,496 Left border region of T-DNA of Agrobacterium tumefaciens nopaline ti-plasmid.

[0442] xTAG Start: 15,319 End: 15,358. 40 bp site for plant insert intactness testing and to stop readthrough ORFs.

[0443] xSTOPS-01 Start: 15,307 End: 15,318. 6-frame stop to minimize unintended ORF read-through.

[0444] xSTOPS Start: 15,231 End: 15,242. 6-frame stop to minimize unintended ORF read-through

[0445] tGmEPSPS Start: 14,433 End: 15,242. EPSPS terminator from Glycine max.

[0446] cNtALS Start: 12,432 End: 14,426. The NtALS DNA fragment encodes an Acetolactate synthase double mutant (P191A, W568L) from Nicotiana tabacum. It was codon-optimized for soybean expression.

[0447] u5GmEF Start: 12,413 End: 12,423. Second 5′ UTR of the soybean elongation factor (EF) gene.

[0448] iGmEFStart: 11,504 End: 12,412. The first intron of the soybean elongation factor (EF) gene.

[0449] u5GmEF Start: 11,441 End: 11,503. First 5′ UTR of the soybean elongation factor (EF) gene.

[0450] start Start: 11,441 End: 11,441. Transcription start site

[0451] prGmEF Start: 10,358 End: 12,423. Translation elongation factor EF-1 alpha/Tu promoter, including the first intron and neighboring UTR, from soybean (williams 82).

[0452] xSTOPS Start: 10,346 End: 10,357. 6-frame stop to minimize unintended ORF read-through.

[0453] xSTOPS Start: 10,327 End: 10,338. 6-frame stop to minimize unintended ORF read-through.

[0454] tMt51186 Start: 9,327 End: 10,326. Modified terminator of Medicago truncatula gene.

| | | | |
|---|---|---|---|
| intron4 Start: | 7,097 | End: | 8,696. |
| intron3 Start: | 5,404 | End: | 6,265. |
| intron2 Start: | 4,880 | End: | 5,127. |

[0455] iAtBAF60 Start: 3,360 End: 3,768. Intron of Arabidopsis thaliana BAF60 homolog (CHC1 by the Chromatin database) inserted in GUS coding sequence to prevent bacterial expression.

[0456] cGtoRG30-01 (SEQ ID NO: 4) Start: 2,734 End: 9,320. A CDS of a soy R-gene that encodes a protein containing toll/interleukin receptor-1 (TIR), nucleotide-binding site (NBS), and leucine rich repeat (LRR) domains. This CDS is from an R-gene in Chromosome 3 of G. tomentella PI_505267.

[0457] iMt51186 Start: 2,450 End: 2,700 The first intron of the Medicago truncatula gene.

[0458] iMt51186 Start: 2,450 End: 2,574 Truncated version of the first intron of the Medicago truncatula gene.

[0459] start Start: 2,313 End: 2,313 Transcription start based on cDNA/gDNA alignment.

[0460] prMt51186 Start: 217 End: 2,721 The promoter from the Medicago truncatula gene.

[0461] xSTOPS Start: 184 End: 195 6-frame stop to minimize unintended ORF read-through

[0462] xTAG Start: 144 End: 183 40 bp site for plant insert intactness testing and to stop readthrough ORFs.

[0463] bNRB Start: 101 End: 125 Right Border Repeat

[0464] bNRB Start: 4 End: 143 Right border region of T-DNA of Agrobacterium tumefaciens nopaline ti-plasmid.

[0465] The above examples clearly illustrate the advantages of various embodiments of the invention. Although the present invention has been described with reference to specific details of certain embodiments thereof, it is not intended that such details should be regarded as limitations upon the scope of the invention except as and to the extent that they are included in the accompanying claims.

[0466] Throughout this application, various patents, patent publications and non-patent publications are referenced. The disclosures of these patents, patent publications and non-patent publications in their entireties are incorporated by reference herein into this application in order to more fully describe the state of the art to which this invention pertains.

The application's sequence listing, which the Patent Office published only in electronic form, follows.

SEQUENCE LISTING (237 sequences)

SEQ ID NO: 1 - DNA, 7202153 bp, Glycine tomentella (residues 1-1,800,539 of 7,202,153)
tgaggccttcaacaacgccgtggaacaaattaaatgcttgaatccggaggtggtacttaccactgtcgggatgcatttcatggcgtatgttgatgacggccatcttattcctcctactggggctgaggagtctttaatgccggccgtcgaggataccatccccgggggagaggtgacttctgacatgccgattaccaccgcgcctgtcgatgaccaatccaaggaatgaaggaccggaatgccggttaaatttgtatttcgtgttttcttaggaacaaatttgaaatttttggtttatttatatgcagtttaggttggggcttcgagcctggagcatgtttttttaacaatactttatatttagcaatactttatattatccaaattcattctgttcggaggatttatgcgcgcagcattggttccaatgaccaaatcttatattcatatttattctttaagactcagatttttactatgaacaaccccgctgaaggatactcctttttaccgatttgatcagaaacggtcagcgtatcattcaaagccctgaaatctagtcggttaattaagtgatgtatcacgttttataagcaaatgtataacactgatgtactggatgttttgctataggatcaaatttcaactctcctgttccaagaatatctatggtgatgagataccttgaaacagtcgatcacagagagaaaccaacaattgacgtggggtgtgtgctctgtgtaattgaaagagatagagtcagagtgtgtgtacctttttagcaataatcattatatatttataagcaatgtaccttgcagttgtgacacgaactgcttccgggaatctcggcctccatgagcatatcttaactactggtattgactcagttttaacccacgttttctaagacgtggaatacataataaagataattgggcctcgtttctaagcccaattgtcgcatccacaacaccaagtatattagatagaatatatgaaagcaaattcgtattcatacaaaaaatctttttttttcttttgttttgttctttaaaagagagaaacctgacgtatgttgatttagtaaatcatatgatggaacaaaatcattttaaattgattaaaaaatgacacacgacataatattttgagataactaattatgtgctttaaaggatcttttatttatatgttggttaacatgtaagatatgcaacacacgttaccttgccgttggaaaatattataaacagaaaacatgaaaaaaatgatacgatgaaaaggacgtgaaatcgttaaaaaagagattttgtttgacttaaagtctcaactgacaccaacttgttataactataaatgactctatacaattgctaattccttatgtagtttgatgtaagtcactgtcaattcttattcttaaatattctattcaaatcattatctgtatattctattaacatgctacaacaacaaatggaaacaaacttttttcacatgtgtatttaatctacatttagttatgccagttatgtcgctacaaaactttctattataaaagcaacaaaactccatatatgtacaccaatttatcttaaagattgcttcgactttcaacaaagaccaaaaacgacatcatgttgaatccttcattttcttctcatgtggtatgcaatatttgtatctttttttaatcacgtgtttgaattatatgtaattaagcttaccttaaaagaataacatcacaaacataattcataattaattatgtaacactacttgtttatgttcaggataacatgaagtttatctctaatgcaatgatactttcattctcaatactactgttgctaccaagtacatcatattcactatatgaaaagcctaaaaaccatatcaagacaactactattgtatctgagagttttgaaatgggaccaggatcaattgcaacaaaaacatttgaggatataaagtttccgaaaggtcatgttggaattaagagttttgatgccgaactagttgatcaagaaggaaactctataccttcgtatgaaacttaccttcaccattggtttgcaataaagtaccacaaaaaacattactatgtcactgaatcctaagctttgtcgtcctgaggatgcttttttcaaaaggaatgaaggcacatgtaatggtggtattcttccacattattcgggatttggagttgaatcacgaggaacaccgtcaaaagtccctgatccttttgctttagaacaaggtaacccaacaaaaattaaaaagggatatgaagagaaatggttgctcaacatcatggccattgatacacgtggtgcacaagataagaaaggttgcattgaatgtagatgtgaccatatgaatctcccaaaggacttttataatgtcataagggatatacataaccaaccattgactacaaattacaaaggaggtctcttttgttgtcgtgacaacttacagtgcaaacaaatagagggtttccaaggttcaagaagaatggtttccttaagatacaaaattagttgggttgattggaacaaataccaagtaccagttaaagtttacatattgattccaccaacaaaattagatcaaatggttccaaaataattcatgattgtcaggtagataagttattcaattaagatagtactttgtgtaaaaaatagacttttcaatctctattagagtgagtgaacaaaaatcaaattcttaattccttgcaggcagaatataccattccaggaaatggtggtggtgattctcctcatgtccaaaaggcaaacatcccaatagaaaaaggaggttatctcatctatggcactgctcatatgcattcaggcgttgtaaatgcaactttatatggacaggtgatgaataatattttcattattcttatatactccttttgtgattagttacatattaatttttaagaaatattttgtttgtgattttttatgtaataaatttttttattttatgtcataacaaaaattcatatattgtaatgtatcttgaactttgaattttatgttatgttgtcatttaggatgggaggacattatgtacttcaacaccaaaatatggaataggaaatgaagcaggaaatgaaaaaggttatctcatcggaatgtctgtttattatccacaaccaggttctatcaagattcatgatggtgaaattttggatctagaatctagatataaaaatgagttttgtacgggagctatgggacatttctacatctatttggactgaagaggaacacaggtatgtctctgaaagaaacacatttctttatatggttttattgtatggttgtttctcgtttaaatttctgaaatggtttcttggatttttacttcactcgttacttcttttttgttttaatcattgtttctttctatttttcaaacatttaattatatttgggtcaaagaaaagtgaccaatgacaaaaataaacgtagcaagtgaatttatcttctttgtagaaaagatttcaattgtcttacatatttttgttcttcttcctggtttcgataattcaaattgttttcttgactaatgaacatgaaacgctagcttttggtgaagttgtttactgtaatttaattcaaaaacagaatgatttctttttaatcattatttaggaatcgtggcagaatgtgctaatgcgtttttcttggattttttacatcatttgattgtttctttcttgttgaaattattgtttacaaatattcagtatcttactgccttttttatgatagactgtttttctctgtttttgtttttctaatttttttaaatttttaaataaaaaacagtaaaaatataaaagagagatattttgatacacagatttgaaatctgaatttgttatgaaaagatatcatacgagatattcttgttcaattttctatattttattttttatttattttaaaaaatgaaaatttataatagggtgagacgtatagtttttttctgcctgcaagcccatacatacatttaatttataatgtgatgctgcagtacgctgtgctatgttgtctcacgccaccagcacgttggagaggctcaccttctggtggaggaaatacttttgtgcgtggctagctacttgaagagaagcacaggtacatgtgagaaagaattacatttaattttaactctttatgttgttattgctcacttttaaatttttgcaagtttcatcttcttttcttgttagaattattgttttcaatgtccctttgtttacgttattgttcatctgtttttaacctataatttaaccaataatatactatattttgacaggtcaaatctaatctaatatctataaaaaaattatttcataagataataccacatggcattttaatatttattttctttaaataattcaattaatacatatttatatttgttatattttattatatttccaatagaattaattaattataatacataaaatcatataaattggaatattgagattttaaatttattctatttttttattttatataataagtttaagaatcatgtaaactgatatggtatattttatattaatcaaagtaaaagtgtgaaaaatattcaagtacaaatatattttaaaatataataaattttaagtaaacacaactaataaaaagtcatttgggtgttttttttaatttgtatagataaaatttaaatcaattcatataaatatattttattattatgaaacatatttgtgcataattttaattgattgtccaataaaataatttaatcaatattaatttactctatatatttattgaatgttatacattataatttataatttttaaattcaaatcacaattgtatgtatattaatatatttactaatatatatttattaagatttatactaataaaatatattaaaaatttgaatagtataaaaaattattcccataaattataaaataagaacttaatattcgtataagacacaaacaacttaaattatcagctttccaataacttaatagtcatattttaataaattatacgttataactttaatatttcagcaactaataaaactaaattaattcttgactttaacatctcctgaaactaaaagtcttccctgggtcatcccaggcatgccccactctcactttgtgttatcatgttattttttacagacattattggatacctaccaattttattatagacatatttataatatatattttcaaagtcttaatatatatatatatatatatatatatatattcaacgtattatttcttaataaactatttattattgggtcaatacagatcctattaagtagagagcgagtctaatagatttcatataaaattcattcaatctctttttcatttaatattaaaaaataactagaacatattaacagtatcatgtaaatacaaattatctaataagttcattgatttttatcacaattatttaaaaggtgtgtacgtgatatataatttatcattgattgaaagtataaatcataaaaatgcaatgttaacatttcccttttactctttatatatatatatatatatatatatatataaacttcctaatgtagttcatattgggaaatattacaatgtgttagtattctcaataaccaaaatgatagtttatccaataatagcatagtagcaatcttcttaggacctaatctagtgtcctggtggtcgaagaaatagaaagttgtggctagatctattacggaagcaaagtatagaagcctagctcttcttctgttgaagtgacttggattcagattttgtcatgtgaattacatgttagacacattacaccagtggtcttttgcgataatatgagtacagtttttccagcccacaacccaattctgcattccataacaaagcacatggagcttgatttattttttgtcaaagagatagttatgaaaaaagatttcttcaagtgatccatgtccctgctgttgaccaatatgctgacatcctcaccaaatctctatctacttcaaacttcactgtttttagggataagcttagagttaacaaagcttttgcaaatccctcgtgagtttgttgggggtattagagtagaagagtagaattacttcttttcagttttttaactactgatggttagtgctgttagttaactaaattaaggttgattggcagttactaatgttaacagctgtctaactatagtatagttacttcttttctgaagtttgtgattttttcttctatcatttctgaaatccttttagaactgggtaaacatcagtataatattagttcttgaaactaacaaataagtgtctataacttcttactgatattttaactcttaaacatattaattttaagtacatttttaaaaaaattggaataatataattattaatttacacatttaattttgtttttaattccctttaatttaattgttgaactaatggcagagtgttgtcaaatttcaagaaataaagtaaactaaagtggtagttgagtcctaaatcctaataagaatagaagagtgactctatagagcccaacggaaaagatattgtaaaaagagcatctgcaaaagataaggagatactcactgcatgccattcctactcctaacatcttccgttgcgcgtggtttaatggaagagactcacgcgcttgctgttggctacttgccttcgctctgcttacaaaccttcttcagaacttcaactcttcgatctcctccactttgcgcattgtactctctctctcttatcttctcaactcaacatcaaaacaatatcaattcttataataactcattgcacacataaaatgaatagaagaagataattttcacgtgattttgaagatgaatatctatatcgtgtctggtactactatttcagctttacaagaaatgcccatagcaatcaacactgatgagcaaaaatctcaacattatgaattaccgaccactttcttcaagcttgggctcggaaacaatctcaaatacaggtaccactgttgttagtatcatgttttattaattatagtttggatttgggctcatgaatagttaatgtgtttagggtttctaagtctatatattttcttataatatgagtgcaattgtacaaacgtgtgagggaatatagtaaaaagttggacctaatccacattaggtgaaccagggtaaactttgcgtgttgttttcttctcttttttttctctctcttctcaattgttatgtgattgtgcgtacccaatagaagatactagtagagaatgcaacctaaaaaaagagctcatatagaatagaatagtaagttttagggtgaccttgttatcatatgtttggtgcattatggtggtgatgatcattatcttattcttaccaaatgaaataaataatcaaattttattaaaatatattttattaattaaacgaataataaatgtttcttttgtgatagcgcatgcacatgaatgcatacacaatagtgatttaagatgattgagatatatattttcttaatgataaagaatgtggtgtgtgagaatacatcattttgaaagaaaactagagaaagtgttaaacatacataattgatagagtggtgaattttaatttataatataaaaataaattcatttatatttgtagttttatctttaaaaaaacaaatttgttagtatatttattatcacatgtttattatatttttatatgtcatagagagttgttgacaaaaaaaatatatgttgagttattgatttttttaacacaaatttatgaatgcaacttatgaaaaacaaaaaaaaaacacaaaaaaaatgtatttcacaatcacaaaataatattttttatcacataattataatttttttggacatctttcaacagtggaccctaggtcatggttatagaaactaattcagtccaatcagaccgattggaccatgacccagtgccctaggcagtctggttaatgtaaagtaatgaaaatgcattcgaccaatattgaccccgtcgagtttggtcaaaccttgtgccatgaaccaagttagttcggtttgacctgatcgctttttttttgtttttttttttgtttcaagttcctatacgatgttaaattgttagtagctaattattgttttattatccattataaaaaaattattgttttagtatcttatctgattgtaacaagtaacgaatttattttgcttgtgaatgtgtcgtatctcatatcctaatgcatttttgcgcatgcatacagtgcaagttccacaatatacagtgtgaaaactgacctatataaatagcttgtaagatacgaatatgaatacgaaaagaccacaaatatagacgtaagcattaggaagtgactagtagagaatgcaatctaaagaaagagtttgaatcctacaaacatgcaatgcatcttcgcatgtaaaatggtttagtaagtttagggtgacattgttatcttgtgtttggtgcgttatggtggtgacaaatcattatcttgtcttaatgtacttgtatcatattatcgtgccatatataaaaataaagatgtcaaatgaaataaatactcaaattttattaaaaatataagttttattaattaaacgaataataaatatttcttatgtgatagcgtatttttgcgtgcacacgcatgcatacatgcaaagatatatagatggtaatttaagattattgaaatatatatttttcttaatgacaaagaatgtggtgcgtgaaaataaagaaagtgagagaaagtgttaaaaatacatattgatagagtggtgaattttaatttataatataaaaataaatttgtttatacttgtatttttatcttttaaaaaacaaaatatgttagtatatttattatcatatgtttattacatttttatatgtcatagagttgttgacaaaaagaaatatatgtaagagagttacatatttttttaacacatttatgcatgcaacttatgaaacaaaaaaaaaaaaaaaaacacaaaacaaatgtatttcacaatcacaaccaaataatattttttatcaaataattataattttattggacatctttcaatagtggaccctaggtcatagttatagaaattagttcaattcagtcggaactattgggatatgaagggtgattaaaggagtgcctaaaattaatctgaagctaatgagtgtcattgcaattttcttaaaaaaaaaaaaaggaaattgcaagatagaaaaagtaataacaatagtccgcaaactccaaaaattctaaaatgtgaattctcctcttatactattgatgaaaaattatgaattggaacggtaaaacgaaacagtgtcggctgcaattctgtattcaagcacagctatcccattctccgttaccatgttgatggtgagcttatcagataatgacattgtcttacttaccacgttgacatctgtcatttgaaatttcacgaccagaggttgaaccatccttcttaaggtggcttcatgaacctaatataaacaaataaatatatattagtgctagtgtattataaaaatggtggcttcatgaagctgtaatgaattaattaatagcataccacatgcatgcagttagtagtgaaagtcttcaaatctacagtagtagtgctgaactcgagatcctccgtcttggtaactcgaatattaactagaaaataagaaaataagaaaatgaaagaaataaaaaaagaaagaaagaactagaaaattagaaagatggatggatggatcgatcgagtaggaaacttacgagtctcggcaacagtgtgattacatattgtgctaaaggtggctgaaggcaaatcgataatgatattgaactcgtactcttcctcgggagcagtaaggtgagggaaatgtaaaagaaaattcttttgtgggttttggaagcctaaggtgaggtggccgtggagttgttgggttgtcaacgagatgaaatcatcgtcgtgactttggtggagatggtggaacattccctccagctggtacaccgagaaggtgtcctcgcatatatagtaagtgaaagtgtgaggggacgctgatctccatggttacattcacgtcggtatacacctttttcattgacaagtctcacgcccagagaaaacaaacttggcaccgctcatcaccacattgatggcctctgccaccttcttcacggcgaggcttggccgagatgagctttcatcttttagtaacttctgcttgcttctaggttacagctatgataaactttttgaatagaaaagtgtgcataaatagaatattgcaataccactttctgttttgcataagagaatattgcaaacctggtgacatgtaccaaattagctcgatttgactcggtctttttttgttttttgttttttccaaatctctataccgtgttaaattgttaataactaattattgttttattatccattataataacaacttcgttttgcttgtgattgtgtgtcgtacatcgtatcctactgcattttttggtatgcaatttgcttgaaaactgtactatataaataacttctaagatacgaataggaaagcaccacaaaattagatataagcaccatgaaaagactagtagagaatgcaacctaaataaagagtttgaatcttacaaacatgcaatgcatcgtcacatgtagaatggtttagtaagttttagggtgacattgttatcatctgtttggtgcattatggtagtgatgaatcattatcttgttcttactgtaccgtcttgtatcatattatcatgtcatatataaagataaagacatcaaatgaaataaataatcaaattttattaacaatatattttattaattaaacgagtaattgtgatagcgtacttttgcgtgcacatgcgtgcgtacataagtgcgtacatacaaagattgatagatatgattgagatatatatttttcttattggtaaacaaaacaatgtggtgtgtgaaaatacactttcaaataaaatgagagaaagtgttaaaaaatccaattaatagagcaatggaatttaatgtataatataataataaattcatttatatttgtatttattttatctttttttaaaaaactttcagcatatttattatcatagtctcattacatgtttacatgtcatacatgtagagttattgatttttttgtatgacatatatttatttttgtcaacaactctctatatgaccaaaaaatgttaatagctaattattgttttattatccattataaaaaattattgttttaatatctcatttgattgtaataagtagcaaatttattttccttgtgactgtgtctgttgattcagatgaagtcaagcatcaatgaatgaagatcaagcttgaaagttttgtgctttcaacattctcaaagacaaaggttcaagaaaaagcttgaagaccaatttgattttgtaaaaggaaagcatatgatctgataatccatttgtgcatatcatgcattatacattcatataggattattagattagaatggtttaattaaaggcaagtcacaagtaagggattaaaaagctaagtttttggaaaaatgaaatctgactgcattaatcaattacaaaacttgtgacatcgattattttgttcttcgtgcctttagaaaacaagtcatgaacattgtaatcgattacatatcgaattaatcgattacataggcaaaaataggaaaaacatgattgactgtcttaatcgattatcgaagggtcgtaatcgattacatagtacatttagaaaatcataactctctggtttaatcgattacgtatcggtttaatcgattaaatggttcgttcttggaactcaggagtcacattgagtattttaatcgattaccatcttgatttaatcgattacatatgcgaaataatcgattattggagcgtgtttaatcgattattatcagttaaaaatcagttataaatagcacctcttaagctgaggtttgagacttttgtgcaatttgaggaatacgagttctaagcattcacaaacactttgagccttcattagtaactatttctgagtttctaacatcattgtgacttcatcaaatcacatgggttattgatttcaagattgaagcttcattgattcattcaaagcataaggaaaggattgcatatgtgttggtaatttgtcatcaaacctgtgattcattcatatgcattcattcttggattatcaggtgatatctttccttgtctttgaaggtgtaaattgtttctttgaatttttgtaaagataactctattgtaaatgagtttcttgcaagtgtagagatagtgtttctctagattcagctgagtagtagagataatgtttctctagattcagcttagtgttctcagtgtgggttttggtctctaagagtctaatagggttttagacttctgaactttatctagggttgataaagagaggcttgtaaaattgcttgtaaggatatttttgcaataatggaactctactctagtgttgagtggaagaactggatgtagcctcatagagtttgaggtgaccagtataaaaatctgtggcttatctttcttctctcataatcatctctcaattactttgtttgtgaatcaatttcattgcacagaatactatactttgttttctatcattcttgaaaaagggagttgattgaatattgattcttggttttgataacaattttgaaagtgataaagatcctgtggtaactctgatttaaaattttaattggccaaagttcaaccaattcaccccctcttggttgtttgaagtgttcctttgttttttcagtgtcgtatttagtatcctaccgcacttttgtgcatgcatcgcagcgcacattgcacagtgcacaaagtgaaattgacctatataataactggcaagataggaataggaaatgaccacaaaaataagcataagcattaggaagagactactagagtagacaacacaatttaaagcaaaagtttgaatcctacaaacatgcaatgcatcgtcccatgcataatggtttagtaagttttaggattgcgttgttatcatctacttggtgcgttatggtggtgatgaatcattgtcttgttcttactgtaccgtcttgtatcatattatcatgccatatataaagataaagatgtcaaaaatgaaataaatactcaatttttaaaaaatatatattttattaattaaacaaataataaatgtttataaagtaagtgtgcgtgcacatgcgtgcatgcacataaagatagatagatagtgataaaatgattgagatgtatatttttcccaatggtaaataatgtagtgtgtgaaaatgcactttcaaagaaaatgagagaaagtgttaaaaaattcaattaatagagtagtggattttaatttataatataaaaataaattgatttatatttgtatttattttatcttttgaaagaaactttccgtctatctattatcatatgttcattacatttacatgtttatatctcataaagagttgttgaccaaaagaaatatatgccacatagagttattgatttttttaacacaaatttatgaatgcaactcgtggaaaagaaaaaaacaaaaaaaaatgtatttcacatgttttaaataatatttttttcacataattctaattttttcgaacatctttcacattcctatattatgttaaattgttaataactaattattgttttattatccattataaaaaaatattattttagtatctaatttgattgtaacatgtaaccactttattttgcttgtgacaggtcatatatatatataccgtatcctactgcatttttgtgcatgcataacaactcacattgcacattacacaaggtgaaaactaacctatatagctggcaagataggaataggaaatgaccacaaaaataggcataagcattaggaagacactaggagaatatagagcctaaagaaagagtttgaatcctacaaacatgcaatgtaccgcatgtagaatgatttagtaagttttagggttacattgttatcatttgttcagtgcattatgttggtgacaaatattaacttattcttactttgtatcatattatcgtgacatatataaagataaagatgtcaaatgaaataaatactcaacaattttattaaaaatatatattttattaattaaacgaataataaatgtttcttgtgtgatagggtaagttggcgtgcacatgcgtgcgtacaggctagcggaccccaagctatggaacttgtgacgaatatagatatgtagtgttttaagattattgagatatgtctttttctcaatgacaaagatagtggtgtgtgaagatacattttcaaataaaatgagaggaagtgttaaaaataacttatggatagagtggtgaattttaatttataatataaaataaattcatttatatttatatttatatttttatttttattttctttttaaaatcttttagtctatttattatcatatatttattacatttctatatgtcatggagagttgcttaccaaaagaaatatgtcataaagagttactaattttttttaacacatctattaatgcaacttatgaataataaataaatgtatttcacatttacaaaataatattttttatcacatcattataattttttggacatcttcaacaatggaccctaggtcatagtcatagaaactggttcggaatgcattttactcgttaatagctaataattgttttattatccattataaaaaaattattattttagtatctcatttaattgtaacaagtaacagctttgttttgcttgtgactatgtcgtatcctactgcatttttacgcatacatggcagagcacattgcatagtacacaaggtgaaattgacctatataataaccagcaagataggaataggaaatgaccacaaaaataggcataagcgtaatgaagagactacgaaattagagaacacaacttaaagaaaaagtttgaatcctacaaacatgcaacgcaccctctcatgcataatggtttactaagttttaggatggcgttgttatcatctacttggtgtgttatggttgtagcgaatcattgtcttggtgtattatggttgtagcgaatcattgtcttgttcctactttatcgtcttgtatcttgtatcatatcaacatggcatatgtaaagataaagatgtcaaataaaataaatactcattttttaaaaaatatatattttattaatcaaactaataataaatgtttataaagtaagtgtgcgtgcacatgcgagcgtgcacataaagattgatatatagtgatttaaaatgattgagatgtatatttttcctaatggtaaattatgtagtgtgtgaaaatgcactttcaaataaaatgagagaaagtgttaaaaaattcaattaatagagtagtggattttaatttataatataaaataaattgatttatatatgtatttattttatcttttgaaagaaactttcagtccatctattgtcatatgttcattacatgtttatatctcataaagagttgttgaccaaaagaaatatatgccacatagagtgattgatttttttaacacaaatttatgaatgcaacttatggaaaagaaaaaaaaataaaaaaaaatgtatttcacattttttaactaatatttttttatcacataattctaattttttcaaacatctttcaagttcctatattatgttaaattgttaataactaattattgttttattatccattataaaaaatattattttagtatctaatttgattgtaacatgtaacaactttgttttgcttgtgacaggtcatatctcgtatttatcctactgcatttttgtgcatgaataacaactcacattgcatattacacaaagtggaaactaacctatatacctagcaagataggaataggaaatgaccaccaaaataggcataagcattaggaagagactccgagaatatagtctaaagaaagagtttgaatcctacaaacatgcaatgtacaacacgtagaatggtttagtaagttttagggtcacattgttatcgtttgatggtagtgacgaatattatcttattcttaatttgtatcatattagcgtgccatatataaagataaagatgtcaaatgaaataaatactcaaaaattttattaaaaacatatactttattaataaaacgaataataaatgtttcttgtgtgatagcgtaagttggcgtgcacatgcgtgcttacttacaaatatacatagatagtgatttaagattattgatatatctttttctcaatgacaaagattgtggtgtgtgaaaatacattttcaaataagatgagaggaagtgttaaaaatagctaattgatagagtggttaattttaatttataatataaaataaattcatttatatttgtatttttattttctttttaaaatcttttagtctatttattatcatatatttattacatttctatatgtcatagagagttgcttaccaatagaaatatgtcatagagagttactaattattttaacacatctatgaatgcaacttatgaataataaataaatgtatttcacaattacaaaataatattttttatcacatcattataattttttggacatctttcaacaatggaccctaggtcatagttatagaaactggttcggaaaatgcattttactcgtattgttaaatgcaacttatagaaaagaaaaaaacaaaaatatgtatttcacattttcaaaataatatttttgtatcacaaaattctaattttttcgaaaatctttcaaaagcggaccctagatcatagttatagaaaccggttcggtctagtcagactaattggaccaggaccaaatgtcctggacggtctaattaaggtaaagtatcggaaatgcattcgacccgtattgacttgtcgggtttggtcaaaacctggtgacccaaaccaagttagcccggtttagtggcggacccagaaaaaattgttgtttatgtccgcacacttagtggtgagggtttggggtagtgccccgaaaatatttttgtaaaaaatatttaaatcaacgctttatgtacaaaattataaacccgctaaaaatgtagttgcttttgtaacaagatgcaaattaaaaaaaaatagagaatcgacgaaaaaaagaataaaaacgtatatgattatttgaaacaggaacggatttgaagcggtgagaatcaatctataaataaaaagacaagaaggtgtacaaagctcttataaagtatttgaccaaaggaaaggacaatgactttgcttttgcagcataaatcaaatgaggtagcttagagatagagctactgaatttacgaaattgaagcgaaagagagaaaaaaaaactggagcaggttttgaaatgaaggtgcgatcctaggcgcggatttgtttcttttctctctatctgggaatggctgtgcggtatggtgtgtgtgctctgtgttgtgttgtgttttttgccttagatgtaaccacaccctctccatcgcggcaccgcagttcaaccccaccccactaccacatatcaaaatttttatgtccgcacttgtggacataaaaatcaacttgggtccgccactggcccgatttgaccacgtcgctttttttgttttttttttttcaagttcctatatcatgttaaattgttaatagctaattattgttttattatccattataaaaaaattattattttagtatctcatttgattgtaacaagtaacaatttcaattttgttttgcttgtgattgtgtcgtatataaattgacctatactaactagcaagataggaatagaaaataaccacaaaaatagacataagtactaggaagagactatgagagtatagaacgcaacttcaagaaaaagtttgaatcctaggaaaggtatagaatagaaatttgtttattttgatagctttatcatatgaatttttatcatatgataaagctatcaaaataaacaaccacgcaatgcaaaatcccacgcataatggtttagtaagttttaggatgacgttgttatcatatgcttggtgcattatggtggtggcgaatcattatcttgttattattgtaatgttttgtaccatattaccatgccatatataaagataaagatgtcaaatgaaataaatactcatttttttaaaataaatattttatttattaaatgaataataaatgtttttgtgatagcttaagtttgcgtgaaatatatattttgcctaatggtagagtgtgtggtgtgtgaaaatgcactttcaaataaaattagagaaagtgttaaaaatatataattgatagggtggtggattttaatttacaatacaaaaataaattcatttatatttatatttttttatatttttagaaaacaaaatattttagtctatttattatcatatgatcattacatgtttatatgtcatacatagttgctacatttgatctgtattgatccatcgggtttgatcaaacttggtaacttaatatgagttaaccctatttgacaaggtcacttttaattttattgtttgtctagttcctatacaatgttaaatttttaatagataattattaaataacatataatatgatcctataaataatatattttttatgttggtaaaaatatataataactaattattatcaaattgatcaggatatgattcaatatttatgtgttttatacatttttaacatatttgtttataatcattctataacttttgtatttagtcctaaaaaataagagtttccttagtaatttaataataatactcaacaaaatagtaataatttataataataaatgattatataatattttatagtttaatcataataataaatttaattttaaatataaaaatataaattgaacatattatgtatattttcaatatatatatatatatatatatatatatatatatatatatacaggcggatctatattgcaaccagggtgggcacatgcaccctctcatttcaataaaatcactactatttatcctaaaatattatattttgcacctcataattttacattttctatcatctaattttatgtatttgaacctccttactagttcacatataagaataagtaaatacaccatcttattttaataaaatgcaaaaatatattatattttacacctcataattttatattttgaaccccctaattttatgtatttgaacttccttatcagttcacatgtaaaagtaagtaaatgtattctcttattttaataaaatgcaaatatttatcttaaaactttatattttgtacctattatcttcgtgtttgaatccaactatctcatataataatgataattatcaattttaacttttaaaagaaattgcccccagatcgagggtcctagatccgtcactgtatatatatatatatatatatatatatatatatatatatatatatatatatatatatatatatatatatggatcaactgaaccaataaatgatttatcaaatgaatctctaatccactaactttgattgattatcactagggctgggcaaaaaaatccatatccataaaataatctatatccaatccaatctaatccattttaaatccatttaaatggattagtttcatatccaaattcatttttatggattttaaatccaatccaattaattggatattgaaatggatatgaaatggatatggattggatatttggatttgaattttttttttatcaactttggttgagactttttttttgttgacgttcactaacgatgattttaagttgttatcgttgagtctatttttcggttaatgttggtaagttttttttaatcaacattgattgagactatttttttggtcgacatcaattgatgctatttttataccgacgttagctaagtttttttgttgttgtctattgagattattttttatcgacatcaagtaggtttttcgctcgacgtcgactatagttttttttgtcgacgttagacaagactattttttgaccgacatcggttgaaaaatcatcggccgacatcatccaaaaaaaacctagttgacgtcggtcaaaatatttttccaattgacgccgatcgaaaaaatcttagttaatgtcaacaaaaaatatccctagctaacgccagccaaaagaaatagttatggttaatgttgactaacaaatcctagttgttaccaacaaaaatatagtttcaaccaacatcaacaaaaaaaatctaactaacgtcgataaaaaaaagttttgacgaatgttggcaaaaaaatatcaatgatcgacatcggcaaaaaaaaatcttatcaatgttagtcacaaaaatcctaaccaatgtcggctaaaaattagtcacgattgatgttgatcaaaaaacccccaatcaatgtcagccaaaaagtgcattgactaaagatcataaccgacctcaaacaaaaagtaatcctagctaagatcgaccaaaaacatcattgaccaatgtcgactgaaaacgtactaactaatgtcagcaaaaaatagtcttaattgatgccagactaaaaatgtctagaccgatatatgtcgaaattgctttggttgaggtacgtcaaaaatacactaaccaatatcaataaaaaaatagttttgaccatgatcggttgaaaatagctcttcaatggacatgtacaaaatttttactttttagtatttaataactaaaatttgtaaaaaaaatcttataatatttaagtggatataaattggatatatccaaatccatatccatttaaatggattggattttaaatctagtttgtttttaaaaaaatatgaatatggatttaaaattcaatccatttaattagatatgaattggatatgaattggattattaaaaatccaatccatgcccacccctaattatcacatcaatttttataacactatcatagattatcgcctcatgcttacgcccaggaatgaccccgggcatgacatgtaatttttcaaataaggagactttaaaatgtaggaaatagtaacaatgcatacatgttaatacagttgacaaatggaaaacagtagcagaaatgtaatgtataattatactagagaacaaattagagttgtaactgtaatcaaaattggtagtaggtttttctctcgatataatcaaacaataaagattcacgtgacacttatcaacatgtttggtatcacatctctctagcattgagcataaaattaaagttcattacacaagtatgaatttatgtagaattgtgaatcatgaaaggagatccaaacaagcaattgtaattaatatttaagttttgcagtggggtccccgatcgaacggaaagtttttgttcagttcccaaatcccatgaaaagaaataataacaaaaaggaagaaggaagagtccagcccaatagcatagaagatactgtaagatagtctggaagcgacaagttgtggttgtgggagtgtgtaggtgctgctgctgctgctgccattcctactcttacagtgaaggtttaatggaaggaacaatgcagcttgcgtacaagactattttgtgaagctcatgctggctgcactcgaacgcaacgtgctccctgacgtcatcaccaggcgactcacgcgcttcctgttggtttctcgcctttgctttgtttacaaaccatcctccgaacttcaactctccgatatcctccacttcgcccattgtactctctctgttaccttctcattctcacttcttaacccaacatcaattcttgtaataaccattgcagttggacacgtgaaaaagataagaacaagataatttaatttgcagcgacaatcatatgattcatgtgttaccggaataaattatatgtgattttttaggtaattaaaattaaaatttgtctcctactcgatttgaagatgaatttcatgtctggtactctttcagcattacaagagatgcccatagcaatcaacactgacaagcctaaatctcaacattatgaattaccaaccgctttcttcaagctcgtcctcggaaacaatctcaaatacaggtacttgtaaaagttttgctaccattcattaattaagcttaccgtgtgtcttttctttatgacgattatgaaacgcgttgtaaaactacacttagatcccttaaacaaggtcttgtgtttgatcctatgaatgaaaatgcgattggcaggagaatcctactataggtggccagccaaattcactggcagaacgggtgaatactttgcatttacaatattatcagagtaagtttcaaaaaacaaaatgaaacgcataggctatgtttggttcaaactctttttttttttattttgacttaatactactttaaaattaaactcaataaaagatttaaaaataaagcagtagtagttttagcttaaaagttcctttgatttctttgctgaaggaagatagtgatcctgtttttctatttctattttcaaaattgattttagcttttaaaaagaaaacaaagaaaacagacacacactatgctcatgtctcacatgtagctccaatacatagaactcacacccttgagctaggatcacaaaagattagagaatatctttcaactgtttctgttatttggtttttaaaatacattttggaaaaaatttcaaaacttcataaattttggatgagaaattaatttgcatgaaagtatttaaaagaaccagtttcaaagccaaaagcgagaaggaaaacaaataggccctcggtctttacaacaagatcaacctaaaagggtatgcagaaagaatggagggcactgggcactggggacagccttgccattggtcactagattagctaaagcaggtttcctgtactgattaagttatgtgtaacagaactgtaaagattcactataaacaagtcattttctgttgcaaaatgaatacattagggctgcaatttgttgccaatataaattactgacaggtatgtctgcatgaaagaaaagtggtaaaatgaacacaaccttatggctaatttaacattcttatatgcgtgtgaactgatgcagctgttgctatttctcttctgcctcaatgacgctggaagatgctgaagaagcaatgttgaaactgtactgcgagagatcaaacctgaaagatagtcatacagtgcttgatgtgggatgcggttggggatcactggctctatacattgttaagaattgcactaactgtagggttacaggaatctgcaattccacaactcaaaaggcttatattgaggagaagtgtaggtatgttgattggtatctgatatgtgcctagcacatgatgcttttcaagcttaatagatcgttaaatacatcattttatatgataaatagcttccaattggtgtgaatgtaacttatgtgcttcaatgaggtattttggtcaagattgaatgaatagcaggtgaatcagctaagaattatgcagagcagaagatctggcgccaggctcgcgccaggaacaccgcaacctctggaacttggcgccatcagccccaggaccgcgccatcagcgccacggcttttccagcccgcgccatcagcgtcgtgttggcgccaagagcgccattagttctggatgttggtgtcattagcgtcgtgcccgcgtcaggagcgccacaggtggcagagtctgcataatgaaggcaaaacagagatttcactggctactctataaataatgaagcctcagcactgaagaaggatctttggacgaaattcagcaccaaaggagaaagaaggcttgggagctgagctagagtttgggtgtgaggggaagagggttcttccctcttcccttcctcttcttccttgtacatatcatcaagcatgcttctttttgttgtgccaaggccatccatgtttagttttggctagttttcttttgtagttagacaaacactctatgtaaatctcatttggaatggattgaatgttattgttcattaatgctatgttatttcattacactttgcttgaatgtctttatctctttcttagacctgatcaatctaggtaagagcttagagctagggttcacaatagggatattggggctctagtcttggaaccaaatgtggtgacttgttctacattacctagggatagggatgtaggcttgcaatcctttctagtgcatcacttaatgcttaacctaataaatatcactaagggattaaggtattgaaaagggttaaagggttaatgtcactaagggattagggcttaactattattgaatgaggatgcatgattgagtagctagtataaatgaatgtagtaaacgatccatgtaagaatgtcaggagcatggggtgtgggtctacctagctacattagcttacgtttggtacaaccatcatctatcttgtgtatatactttatgttatagttaggtttacatttactttgtccacacatatttctctcataccttttgtcatccaacctaatgattcgatttataatttaattggtcaaacaatcctcgtgggacgatagctctctcttatcactttattacttgagtgatcggtgcacttgccgagtacgcaacagtatcccattgtttgctttaaatattaataaacagatgacccttacgtggaagcaatattttgcttgcaaatttaattaaatactgcatgataatctaaatcacattcctttgttgctctctggtcagggatctttagctgcaaaatttgaatattatagttgctgatattagcacatttgaaatggagacttcttatgacataatattttccatagaaatgtttgaggttagtatatatgaatatataattagtgttgaagccacgttttcttgaattttagagtcagctttgaccttgatgcagcatatgaagaactataaagatcttctggagaagatatccaaatggatgaaagaagatagccttttatttgttcattacttctgccacaaagcatttgcctaccactttgaggtgaacccaacataacactgttaaacaacttggccataatgatttgtgttggttctttgtttatgatattagtcaacgtcttaacaagagtagtgggttttcaacttttcattgttacaattcatttacctactggatatttcttcatgaaggacaaaaatgaagatgattggattacaagatacttctttactggaggacctatgccttcggcaaatctacttttgtgatggtgttgcagaaccccattaaattttgctgtattctaaaaggtaaagatgaaaagatacttccaaaggaaaaattattacttttttccttgataaaagtaaaggaatatgttccgtgttatttcattcaaaatactgaataatatacaggagtgctagcacagattaaggctatagattaggtgcacaaatcaaggctacatattaggctaatttgactaaggatattaactagcctaatataaaagatatacacagatatggaaaatatttacaagaatattttcatattctatcacacccccgcagtggaagcgggaggttctcgtacgctgagactggctcgaaaatcatcaaagagtatgcgcggaagccctttagtgaaaatgtcagcaatttgatagcgagagggaacatgaaggacacgaacttgtccatgagcaactttctcacgtgcaaaatggatatctagctcaatatgtttagtgcgctgatgttgaacagggttactggagagatatatcgcactcatactgtcacagtacaccagtgtagccttgtggatcggacaatgaagttccaaaagtagattacgaagccaacaagactcagaaacgacatttgcaactcctctatactcggcttcggcacttgaccgagacaaagtgggttgtcgtttagaggaccacgagatcaaattatctccgagaaaaacacaataaccagaagtggaccttctagtgtcatgacatccaccccaatcagcatcagtgtaggaaatgagaccagaaattgatgatttgtacaaatgtaagccaaaggtgagggtgccttgtacataacgcagaactcgtttaagagcactcatatgttcagtctttggagcatgcatgtgtaaacatacctgttgtacagcatatgatatatcgggtcttgtaaaagtaagatactgcaatgctcctgctaaattgcgataatgagttggatcctcatatggagaacccgaggaaatactaagtttggccttagtgtccactggtgttggagtaggtttacaagaggtcatgccagctctatctatgatctccgcagcatatttttgttggcaaagaaataaaccacctgcatgtctagttactgctatgcccaaaaaatagctgagagggcccaaatctttcatagcaaattctgaagcaaggagtgacattatagacttatgaagatcatcagaagaggcagtaaggatgatatcatcaacatataagagaatgaatgccatgtcttttcccttgcgatagataaataatgaatgatcatatttactatggtagaaaccaatggttgatacaaaatcagcaaaccattgataccaagaacgaggggcttgtttcaaaccataaagagattttcttaaaagacatacataatcttgatgaactggacccctgaatcccagaggctgatgcatataaacggtctcatgtagtttaccatgcagaaaagcattttggacatccaattgatgaatgggccatgatttagataaagcaatcctgagaacagtttgaattgttgctggtttcaccacaggactgaaggtttcatcacaatctactccaaccttctgagacctgccatcacaaacaagacaagccttatgcctctcaaaagagccatcagagttcgttttatttctaaaaatccacatagaacgaataatattaacatcaggaggtcgtggtactaaatccctcgtcctatttaataagagcatcatattcggcttgcatagcgaatttccaattcaggtcggacaaggctagtgttgggtttttaggaataggagatggggtaatgtgggtaactgaagctgtcagattgaaggaacgttttggtttgaaaatgccatgcatgcttctagtggtcgtggtccttatgggttcaggtctgggtgctggtagggggttggtaactgggccattgtttggggttggagcttggacaggagctatgggaattgggctaggccttggaggtgttggcttggcaacctggcttgttggggaaggaacagcagtaggcaaaagtggttgtggtggctgtaggatttgattgtgccattgatctgttaaaaaagggtgtaattcagcattcaaaaaatcatatgtagtggaagaaggtgtatgcagcttagcaaaaggaaattgggactcatctaaagtgatatgcctcgaaatgattattttgcggctagacaaatcgtaacatttatatcctctatgattagatgggtatcctaagaacacacactgggtagaacgaggttgtaatttatgcatgacagtggaagggaagagaggatagcataaacaaccaaaaactcgtaaatgtgtataagtaggatcccaatgatatagtatttgagttggggattggtgtttaagagatttgattgggagaatgttcaagagatatgttgccatttcaagtgcatgatgccaaaatgatgagggcatggaagcatgagcaaggagggtgcgaattatgttgtttatggttcgtattttgcgtttagcttttccattttgtggagaagtgtgataccataaaggaatatgttccatgctatttcattcaaaatactgaataatatataggagtgctagcacagattaaggctatagattaggtgcacaaatcaaggctacagattaggctaatttgactaaggatattaactagcctaatataaaagatatacatagatatggaaaatatttacaagaatattttcatattctatcaaaaagaaaaaggaaaatgtaagagcagaagtatgctatatttttgtgtaaccttaacctctttttattgcatccacatttagcttacttgtaactgagtacattggtgatatgtgtaggatgatgttacaatcaccaaccattggctagtaaatgggaaacgctacgtacagaccaggttagaatcaactaaattgctcaatgatttacggcaaaattgttatattccatttgtttataaagcaagtttgaactgtattgctgaagagaaaaatgaaattatgttgcaatgaagaatggctcaaaagaatggaccagagaatgacttcatcaagccaattatgcaatcaacatatggcaaggactcagctaccaagtggactgcttattggagaacattcttcatagctttagcagaacttttcggatacaataacggtgaagaatggagggttgcacacttccttttcaaaaagaaataaataagccgaaacctagtctttttatttgaatatttgagaaaggcgttaggacaaaaaagctgataaacgaggttgcacaccggcaaaaaaattaattaattacaatttaaataaaaaaattacaaaaatgtagcagtttgcaaactatatacacatatgtagcaatcaaatacgcctgagcctaacatgttgaatcacgtctatcatagacatgattgggcttcattcacgccatcccacgatgtgtttagtcacatccattatggacatgatcgagacccattcacgtcaaccatagacgtgatccaactacatgatgcaattggttatgctatgttgggctcaatcctttttctcacttttattattactttactgtactactattctttcataccatcatcccacggagtacacaaaaaggaacaaataaaaaaagttggcgtcctatcataccatcatcatcactgttatagaatataatacaaagtgaaaccaaaaggcaaattttgagaataattttttttatgtaaaatcacttgtcctaaacttctattctcagcataagtactaacttttatcgttaatggtatgttcgaaagaaagaaaatagaaaaaatattaataatgatataatttttttttgtttggattaaataaattataaataaaaaatttaaattatttttttcttttacttttctttcaattaaaattttaattatttttcttcttgccatgcattccaaacatagtgtaaatatttataaaatattaaggattgagatttaagaaaggaaattgatttggtcattttctttttaacaattttatttatttatttattttgtgaacttccctatcactccaccaccacatgcaattctctcgtcactcccttccgagaacgaattgaacttctagctctattcaaatttgagagaagttatgttgctatgttttttttgttttttttttttaatttcattcaaattctaaatctcaaatcattacaaatttccttattctttaaccaacgcctaccattaccagatttaccactcttttgctgcaaaatctggcaagacccaaatcggaattcaaatcaaatttcatcccaaaccatcactttcttctattgttttcttcaatttcaagtcaaaatagctttaactcacgttactacaaattggaagaaagcttcaactcgtccctaccaccactttctcctgctaatttcttgaattacattccatatatcaaatctaaattcattctttgacactaatgaagcaaatgaataaaaccaaaatcaacagaacaaacaaaaaaatctcaaacaacaaaactccattcaagaagaaaaacttacaacagatctatcacaaaaaagtaaccaattcatttcaaatccctcaaaccaatttatgtagttgagaacaactaagattaaaagaaagaataacaaatccagaaaaatccatgacatcaatcagcaaaataaatgaataaatttcatgattatcagagaagagaagagaagatgattctgtctggagttccaacccgggtaaggccaaggaagggacagcggtgacgtaggacatggccgtctagttggtgcagtgagctgaaccccgcaaccctgtcttagtgtctttcaccattcccacttttcaaatttatttagaaaaataaaatatttgtaaattcagacagagaatcgaatgaaagaatagcagtgggacagagaaagtaataataaaagtgagaaaaaggacagagcccaacataacagagtgaaatgcgccgtgtagttggatcacgtctatgactaaagtgaatgggtctcgatcacgtctatagtggacgtgattaaacacgtcgtgggatggcgcgaatgaagcccaatcattcaacacgccaggcccaggtgcatttgattgctacatatgtatatatagtttggaaactactacatttttataattttttatttaaattgtaattaattaattttttttgccgttgcacacttcaatcatgttgtataattttattagttgttttaattggttgcttgtctttattttcccatgctgtaacggtgttgccattaaaaccttattttatcttaaattttgggaaagtcaattcaaccctcggaacttagggtcatggcacgattgcatgtgctctctagttcataaattttaaaatatgcacttaagagccttcgtaacgaaaatggccatgctcaaggtagatggccatatatttgtgcacgctccaaactcgtggtctccttccttcccttgagacttgagactacatttttatcttgctgttcaaacaatagggttcatcggtggtgaaaaaagtaaagacgaacaattttatcttttatgttataaatgttttttaaatataaacagacaaattctagatcttacaaaatgtgtttaacttctaataagacattcgatcttactagacagtaattgacaaaataaataaaatttataatatgtatgaagaaaattatgatgtcaaataaaatagcttaaactttgatatatcaacatttaaatgttgaattaatactagctatatttggtttaaaggccttattttcttattctctttttataagaacgtggactcgtacgttgttctagtttaatgaatattatcgttgctacaaagatttggagataaaagtacatggaatcaaaatcatactaatattaagaaagagtgcgacacaatcaataaggtccaattaagttcaaattttctttttgtctggatttcaattagtttacagtgaccaaaaacatttgtttaactattggctgcaaagcagaattagtttagattctgtgagaattgggttaaccatctgatatgtctaggagcaagtccctacagggtcaccaaaaagtgcagcggtaatttttaatactcaaccaacgacaatcgcaatacctcatcatcaatcaagaggtaaaaaccataatgatttagaatcatgcactatgcattaaccatcggcaataggcacaagtggaggcaaaccctttaatcgcttttggaaaattcaaatcaccaccgggagaacctgagtcccccaggaataggggatacagcggaaagaaatgttatcaatagttctaccaaaagaaagaacgaaaaagaatggcatatataatcatgatttattgatgtagtgcacacaaagtgctgcccgaatacacactgaaccaactcatgacttattattttcacaagtcctgactattgttacaattccctgcttggtcataaaagattaaaatggaaggccaaatacatgaaactcccagtctccagccatgttagagataagagggtcaaaaactcaaatgtacaaagccacagccttactccggtgattggagaggctttacagacgggccaaaatataataatgaaaattctatccagtggcaataatcaatattctagattaaaaaattggcttgtagctagaattcttgcatccatatactataaaatttggaaactgtaaatgaatatctgtatctgacatttgagcaccatcaaatacattctcgcccaagaaatcaatgtcctgtcagtgtgtatcatgttgataagcagttgccatgatcagatggtaaacggaaaggaaagtgtgcaaactgtatttttaaagttggtgagtcaggctttttatcatcaaacttgtagcctgcatcaaattttacacttgagtacataatgtattttccacacattgataatatgattaagcaacttttaatttaaatttcatattgacaatattacaatcagcctcagtttatgtgtagtatacatcgtacacccatatttatattttgcatatgaacacaaagcaatatgagatatttacttagagtgcttaataacttatagttgggattggagttataaggttgacttggtgattgaagggataagggggaagaagaggtcttgggttcgaatctctcccactaacaaaaaaactaacaaattaacaactaacattggccgatagataaaaaataaacgcttatattagctgggattgtaccaatttacttgactagttgacttagaatattggaataaataagtgttagtgctctgtattttggtccacatctatcatagaatcaggtcccatattattcacatgccttctctcatatttctattttcctcacttcctcaggagtcaggaaagtgcatagatataaaactcaactatatgcaattcaggaaaaaaaaattattaccttgcagggtttccagggcagtgagagcacatttggaatcaacaaactccacaaaacacaaagtcatagctttgtctccactctgcagcatctcagtcatttaaaaactactggttattcataataaatgaaataatgtagattaacactctacactaaatatttttggctgtcaaagctaatgtattactaactagtggaatgctgcaacaagtgagaagcaatatcatattccttaaaaacacataataatcatgacatcatatgtagtccttttccttcctagacaaactataataacattgatagattgtacattactggaatattctaaaatagtcaacatgaaattcttaattaacacacttacacgtctaggctccttgtgaacaactttgatatccttaatagccaataaagggacggaaaagatctatgggtaaaggtcaagacttcatatcaacataacaacaaaatacaaggtatgtttcagaatgtgttttggaggataagggaaagaagggcaaatttttaatttttaaattaaaagatttatgtaatgtttataaaaacaaatagatttttaacttcccttctcatcccccaaaatcccattcccaaacataccattaaagttatttcaggaaccatgtgttttaacttccatatgctgttaaaattaaaaggcaacttattgtgcatgcaaagttttagttcaactcaaaaatagagactaactaaagaggatctcatttagtaaatccaatacaactttaatttcaaaacactttcttcgaatccattattgcctcactaggaacaaaaggcaacacgcaaacgcatacaagcagacatataagctagtaaagctataaaggatacgcccgacttcccttctagtgcagtcttttggaagtccacccacaaacagaatgtttgagtctgccgccggaattggtagaccgtcataactgcttttagaggctggtctttcactgcttacatcaggaacaccatgattaatgcccaacggtgttgtatctcgttttttactcagatcaggatctgcaagaggcgaataacccttaacaggctcagaatgaactctggagcccaaggtatcatcagcactgtaaaacaagcctatctgcagaaacaatccaagataaaaatgaaaatttatctcccacgtgcatcacataataactcaaaatagtcatataaagttttacatctctctgcaggtaagccgatccaatgcccatcaattcagtggaatttgaaggctcagaggggatataaccagcaaagctgctccttgcaatgctagctgacagaaccaaatcaacagtcagaacacaacaataacaacgtcttatcccactaggtaaggtcagctacatggatcacaccatgatcacttttaaaaataggttaaactatttgcttgatcagtattatactagttctcgttttatgtttttagctctgttcaaaaaactattaagttttagtccctaaacagtttttttgtggtgcattatcaccgccaacaaggttttgtagcggttttataccatcaaagtcttctctcatgctctgcataaggatcaaaacttaaacttgcatgcagccatgcacgtttagagactaaaacttgtgtaacgacctaatttctaaattgattttattactagtatttttatgtaaaataaaaatttttcaagaaacatgtattaagaaaaattctaagtcataaaatttacaaaatatgtaaagactaatacattagtcaatgtctctgttacaaaagtttatacaagtacaaaactctttccgaaatataaacctagtacatagctccttcaatatatcagcactactccagaacttcaaggaacttgaccatggttgcatatttctcagtaggcaaagctaaatcccgaccttattagtaggttagtaaaatcatcaaataatcaaacacattcacaagaaatatgcaaactatatgaatgcatgagatgaactattccagggcaaatggtctctacatatcgtactgtatatggccacactaagtgtggaccctgttatagtcttacgcaaacatgcatgaattttgccatatatccttgcacctgggtactacatatcgtactgtatgtagtatcagattctgtttccccaaagcctcgtactgaacttggaaacatggaaacatgaatccacctatcttaataacaccaacatccataaaaatcaaatccataagcaaaatacatattaccttatggaaaatattttcatcatatcatcatatgtatcataagtatggttacaccaccataccttatccaataagtttataagtatggttaaactgccatatcttattcaagcaaaatcattaccaacttagacatgaccaaagaatatcctcacaaaattatgttagtaatctaaataataatccataatatgtctttcaaataatttttaattccttgaaattttcataataaaagattaaaacctagtatgcattttttattctcctttcacctaccacctcactaactaatcatcaaatcaaatcatcaagtatttaaaccattcaactacataccattcatcctctacttcaaaaattaaatcaaaacatgtccataaaaatataaacagacagtccaaagtatcattaaaatcacctcaaaagatcatcaaatggactttcatacttcactaatattgatgggtataaatcatagtctatcttataacttaaatcaacatattctcatcaaagaataacctttaaacatcatgaaatttaagcctaaatatcaaccataaatcagcctactaaaacatgtaaatcaacctaaaccattgattaactagagatttaagcttaacctacctcaaatgagtttgagtcttgatatccttctaagcttattaagtccttcctaaggttgtttgtctctacacgtaatttcttcaaggtgatggggtttacttgatttaagctttaaagggaaagataaaatgaaatgaaagtggtgtgaaggagagagttcacgtgaggtttgaagaaaggaatggtcttggaattggcttgtacttaggttcctcctcctccctttatatagtggtgaagaaatgattacttagagaaaaatctcataagccatcattattcatttacaagtgtccctacacttgttataatcttaaggcttccttcctttcttccttccaagtgtcctactacttggcatgatcttagagtttcttctcttttgcttccaagtgtccaagctcttgaagtttctccatttctcatgcattttcgtggagtagcttgccaaggaagatttttatgctttttctttcattcttgagttttatcccaaacctgttttagtaaaattctaattctggattcgttaaccgttggatctctttaaaattttaaaagtactctactatctcacatatgtaacttttgaccgttgggattgttgaaataatgtctagagctgtccacgtacaagatggaagagtgtagagaaatattgacttgatatttatgttaccttgcatccatgccatacaagtgtcttgccacttgttttcatcctatggcttatcttccaagtggctaaattcaagaagcttcttcctcattctccatgcttctccacgtgaatgacaagctcaaagggaaggaatacaaatttttcttccttttatgctatatgtgatcattttttgatgatgaataaaaatctaatttcaatatggtattttcttaaaaagaaatccaatttaatttgaattcttttatttaaagaaaattttgaatattagaattctagatgttcctaagaatttatcccaatgatagtttaaattaattccaagcagtcttatacagggcaatacataaacctttcattctagactacatctttatcttgtttttgattggtctatacttcttctgaccgtcaaaattactaaaccattttaaataggtctattcatcctataattaggagaaaattctatagattttatgtatcatttttccatatttttcttatgcttgagttttcttgaatacagtttcaaagttgtcatcttctaaaatttgtagaaattttattctagagttttgtgtcacaaaatatgttgatacttagtcaactaagtgtattctataatttcatcaagtttcttcaaaatttctaaagttatttgagtatttttggcctagggacattttggtaattatgtcattcaacctaggggtattttggtcatttttaaaaatgttcaagggcattttttgtaattttcatctttaaggattttctagtaatttctacttcatggagagagtgatatagttatttttctctaaacatgcttataattttggagatgttagaacttgcactttcttttgtactgaaactaaaatataaaatggagacaactatagggaccaagtgaatagtttaaaaaagaaaaaaaaaaaaaaaagaaacagaatgttactatggtactagtcttctatataatataactcatttagggttttagtgctgcaaaataagcgtgaatgttgaaatttaccgaaatgcaaactgaatttaaatccagtggttaagaacatgtaaaattggtttgggttttgttgttctacgtatttgtgtggcgaataacgaattaaaaagaggaggaaatcaattggggttttgtaaaagtatggaatacctccgccagcggctgccggagcaccgtatgagtagtagggatccgccatcgactcttgattcactctcactctccctcacgctggccacaagagaaggaaagaaaactatgaatgagtaaatgaaattggaaagcacactcgcactctttctctctcgactcgttcgtgaacttcttttttttctaatgactaatattatgagtattataattaaaatctatttatttcttttttttatttcatcattagaaattaattattgtaaaaataatatttttatgattttattatgaaaataattcttataataatttaaacgaagttaaatattttaaggtcacctttgtctacaaaataatttaaacataaaacctattttttagtataccaataaataattatataaattattataagtatacaattatttaaatattaatttagaacatccatttgaacccatgtcttttttttttattttatttggaccacagtagaatatttttttggtatatctaagagatatttaagagttctattatttgtagaatttaattagtcctccacctattatataagtccatttcgagataaaatagtacttgtaatcccgactttatatccgactttatagattcaggacaaaaatcaaatctaaaatcttaatcaagggattaaagtgttaaactaattacgtgtaatgacttttgatttatagtggcttatgacctatattagattttgtgcttatttgatttgacatttatataccaaattgaattttatatgttataaaaagttgtacatacttgtttataaaattcatttttcagttgagttcatacaaattgaggtttgtcccaaagctactattgttttgctttggtgatgatagtaaaaagagacaaaaataattcaagatttcaagttgtaaaataagcctctttttaattaaaattaagtttatgaagttaagttcaacaaaattctatttttttagaacaattcaaacacacacttacccccacgatggtttgggtaatacttgtatatatttttttacttttatttaactatattttttcagggtgaagtcaactcatttgaatatataatgatatctctaatcataattatatcacaagtcaataatcaaattataatctttgattaagaaatataagtatcaagtcactcatattagcgaaataatattgtaatttattttatcacttggaagaatcataataaataacatattcgtcaatatattaaaaaaattcagcatgcatctataatcacacgatttaaaaccttttcatattatcagaagaaataagtacaaagggcattttttgtttttggaacaaacgtaaaaagtactctttttctcaagattaatatattaaacctagggaaaaaatttaaatattattttttaaaaaaattacgaatgtattgtaattttaaaagtatttacgcatttataataacgagtcgcacctcccctaagtgtgattgattctgtcgctatcattttttgcgacgacaatttctatcgcaaacaatgttaacgactgaaatagagaccgaaagtagagattaaattttagcgaccaatatttaaaaaaaaaaggattcgggccacaaattttagggatgttacgaattacaatttttggttttcatttaattttaaattcttattaactgaaaaataaaaatatatttatgtctacaaaagaaataaatatataaatatatcttttgatttgttttatattttgccttaattttatttttcgctctaaagttttacaatgtctctacggggacattttttttctttatttaccaaatgggcgtagggtagtcaacaaaaaaatttccacgtggtaggaatcccatttttttgaaaaaaatattggtcgctaaaatttaatcactaatttcggtctctagttcagtcactaacactatttgcaacataaattgtggtcgcaaaaattagtagcgacggaattaacgacgaaatcaatcacgcccaagggaggcagactcattgctataaatgcgtaaattctcgacaggttatctctaagtttatttattcaaatattattgataatactgcaaccacatttcaaataataggtacctaattatctacaagctacaaattatctacaagatacgaattatctactatcaaattatctgcaatatttatatctacatattaattatatacaagggcccaaggcacacgctcatatataaatacagatttcatctaacctttcactaactcattcataccacaatcactctaatacacaatgatttacatacacaacacatcccactcacactcagtcatacttttttctgtataattgatgtacttacttgagcgtcggagtcctttcctttgttttgcaggtcccttttttttaacaaggttgactcattgttcgacatgcaaaatttggaacccacctggaccatgtagtaaggaaagtcctccccgacataaactggccctgacacatactaaagagagttctccttggcttaaggtggccttagcacatactcctgtgcatttgaagaagatgacgaagacggtgaagtagaaatttctatgatttccatagatgaagcaatatctgggatgacaattggagcccaaggaccctctataggtgcgtctaacagaggtagtgaccaagatgatgccaatgaagctggagaagacaaattctttataacctccacaagtgttgtcatctgatcctaaaataaaaacataaagggtgagtttttctgcttcgacactagtcaaaacatacaaaactagcaataagtccatacaaagttcagaaatgaaatccgacaggttggacaaaagtgagagaagcatgagatatgcaaccgattcgactctcatagagccgacaaaaagcgaaagctacacaggcctgaatttctcccaaaaggaccttggtttgaaagatatattcccctaacggtcaatcaaaccaccatcatggatgaagccttcaacacggaggtaaatgtgacttttgcaagtcccacaaagttaggaaaaaaaccctaacaagtacggtcaataccatcgtggcacaggccataacacagatgattgtctaacattgaaagataagataaaagaacttatccaagctggacacttatcaaggtatgtaaagagacctgataatattccacaggaaaacagacaggaggggcgacagggagaccgatccggaaacaaagacaacgatacaagaagagaagacgcagaagaccaagggaggcagcgacaaccgcaacctagacgctagcgtcaaccccctcattagtaagaagaggagcccactaaacatattcgctgtgtaatccatactagcttctcatatggaggactgtctagtgaatcttgaaagagacacttgcatgccatacaagacatagacataaactatgtcaacattcctccatttcgaagtctacctcccattactttcactaatgcgaatttcgagggaatcaatcctgtcaaccccttagtttatggtggagctaaaaatggcaaaaagacatatgttgttgaaggctttgtaaaatcagattattttggctgtttagattcaaggaagtccctcacaggctttgtgttcacagcttttggtattgcagttaattggaaagcaagtcttcaaaaggttgtggccctatcaactacagaagctgagtatgttgctttaagaaaagctgtaaaggagtctctatagcttgaaggcattgcaagggagctgagactacaagacaaggtgatcacagtacactgatagtcaaagtgccatccacctatccaagaattttgtgcatcatgaaaggacaaagcatattgacattaaactgctttttgtcagagaattcattggccaggggtctgttatagttaagaaaatatcaacagatcacaaccctgctgatatgatcacaaaagttgttccaagtacaaagttttatcactatccagatttgatccagttgaagggtgattgaatttgtgtaggtgttctgttgtaatggtttgtttttgaaccaaggtgcagaatagttgtttgttggttctcaaacaatcattagctagttagttacttttggaaagctgtacataactaactttctgttttgacagttaagttagttattagttaggcaattagaatagttcttctattcccttgtatatatccttgagtgcagggtaaaagaagctaaagagaaggatctctgccatagatgatagaaaaaaagaatctgtaactctgtcttagatgcacgattttaaataaaaataccaattaaataaatgatatagttaaaaaatttataatttaaatctactttatatttcaattttctaaaaactttaatctgttgttaagttttttaactcttaattacaacaatattgcttaaaaaatattacaacaatatattcattttaaattttttaaacgaaaataaatttattaatgtaagaacccacttgacacaaaatgggggacaaatgcttcatgcatctctggttcctgcacgttttgaatattctgaaaacctaattcgaaatctaattttatattatgggttaactttttttaaaatataattcaaaatgtaaatttttacattacggattggctaattacattcaagagtgttggaagcaattgccaagatgtggcaatttggtcaaaatatacaagataaaattcagtatatcaaaacccaaccccccccccccccctccataaaggaataattaatattcaaaatcttcatattcagaggaattatgcatactactgtgataagaaattgatacctcattttgcagtaaaatgttaactaaaaaaaggctatttaaatgatgtaaaaacctaaagaaatcttagcatagtgatgaaaaatcttaggaaatcttagaaaaaatgaagataaaatcaaagaagaaatgaaatcgatgagacccaccatttagatttagacccttttatttcccttttgtttttattttcaattgataaataataataataaaaacattaaaagaaataagtggaaatcatcttagcataattaagattacaaggaaatgaaggtatggagatcagtcaaacattgcttaacattgacaaagatcaattccatacaacacctttttcaagagactgagttaaaaaaaatatatatatatatatatatatttaaaatactaaaatcaaaaatacccattttttccctatcagattactttaatttaaaccttttattccttttatactttctttcatctctatcaaatcattttactttacacttcctttcatttcttttcattcattttcatccctttttatcaaacacaccctaagtttgtttataaagttatgattcagttgaataaatatggtttggacccaattttgtttattataatgtattatacattataatacatttaaaaaaaatgtttatcttaaaacgtaaccgtcttgactcatctatgataatctctatatggtttctaaggcatatcgagctttaagttatatgtccatatttaattattggcattaaggatcatttctaaagaatatgattcaagtgggaaaatgttagaaaatatataatatgttactcacatattatgaatttatgtttgatgtgattatctattattataataattgcttgataaaagtgttgttatagaataataaaattagccgttacagaaaactagaagatgactctttattttctttctttaattgtaagaaactatgtggtatagagcttgatagccaatgctacatgatagcctattttgagttttgtggttaaaatatttggtatggtaagttgtaggagacttttgttaaaatgttgcagttcatgttatagaggatgttgtttgtggcttctcaaacaatcattagctagttagtcacttttggaaagctgtacataactaactttctgttttgacagttaagttagttaggcagttagaatagttcttgtattccttgtatatagcctagagtgcagggtaaacgaagctaaggagaaggatctctgccataaatgatagaaaaaaaaaatctgtaactctgtcttagatgcacgattgttatcattgagagtttttcctcctcggagttcgaataagagaatacagcttgttgttgaaacatgagcacattgcttatataatctttgatcttgtgttctgtatcttttctcttcgagatttttttctgatcaagcttcagtgagtgagacacttctgtgagtgtgtttgatcttgttcttggcacaacaaattggtgtggtgagcatggaatgtttcagcaatgggctcggccaagtatcaggttgagaagttcactggtcaaaatgatttttatggcaattgaagatgagagcccttcttgttcagcaagggttggtggatgctcttgctggtgaagccaaacttgaaaatgcgatgacagaagaggaaaagaagacgatgatgcagaaggcccacagtgcgatcatcctgagtcttggtgacaaggttcttaggcaagtgtctaaggaaaagactactgcaggagtttggtcaaatcttgaaggttagtacatgagcaaatctttagtaaatcgccttaatctgaagcaatctttgtattcctttaagttgaatgaggatagaccagtaggtgaacaattagacctgtttaataagttgatcctggaccttgagaaaatagatgtccccatagatgatgagaatcaagccttgttattgctatgctctctacctaacacttactctcatttcaaagaaactttgctgtttggaagagattcagtttctcttgatgcagtgcaagctgcattaaattcaaaagaattaaatgaaagaaaggagaaaaagttttctgtgaatggtgaaggcttgacagcaaaaggcaagactttcaagaaagatagtaaatctgataagaagaagcaaaaaccagaaaaatagaaaaatagtggaggaactctattccaatatcatgtgttatcattgcaagaaagagggtcacactaggaaggtccgtcctgaaaggcaagtaaatggttgcaacaaggataaaggaaaggattctgggaatgcaaccattgttcaagataagggttacgaatcagcagaagtttttgtggtgtccaaagagaatctagaatctgagtggataatggattcagggtgttcatggcatatggcaccaaatagatcatggtttgagaagttctctaatcaagctggtggtctggtccttttaggagacaacaagccttgccttacaaaattgaacgaattggatcaataaggttcaagtttcatgatggggctgagagggttctcacagatgtcatatatgtacttgatctcaagagaaatctaatctctcttggtgaatttgacaagaaagggtatgcgttcaaaagataggcggggatcctaaattttttaaaagattctgtgactgtcatgagaggaatcatgaagaatgacctatattctgttgatggtgaagttgttactggctcagctgctactgcatctggtaaggttctgtcaaaaactaaactttggcaggtggttggggcgtgtaagtgagaaagggcagattgaacttgaaaaacaagagctgttatgtggagacaaagtggagaagcttaagttttgtgaacattgtgtgtatggcaaatcctgttgagccgagttcagcactggacagcaaagaacaaaagggactcttggctatgttcatgttgaactttggggaccaactaaaccccttcccattcttgtgccagatacttcgtgagtattattcagggaaggtttggatattcattcagaagaccaaagatgaagcaattgaaaatttcaaaagcagggctgatcaacatgaagatactaaccaacagtcaaacttgaggtggagcctgagataaaaacaactgaagttcaaggaactgacacacctcctggtgaagaggattctgaagacgagcacaaggaaggaagcagctacctgctagctcaaaatagaacccgaagggaaatcaagccaccggagaggtatggttatgcagatttgattgcttttgccttggtaactgctactgaacttctagatgaagatcctaaggatctagaagcagtcctagtcagcaaggaaaagaaaaattggttgagtgccatgaaggaagacattaagtctctccatgacaatcatacatgggagttgatcaacaaacctcctggttctaaagaaaaattttgaggcttggtgctcttgtgggcctggggtttattatttgtagtttgtacttgtacccataactggctacggtgcttaaggtttctaagcttttatatttccttataatctgagtgcattgtaacgagtgtgtgaggagaatatagaggaaagctggacgtagcccacattgggtgaaccaggataaacattgtgtattattttttcttccctttctctctttctatttttctcaattgttgtgtgattgctcggtaccaacggaggattctctctaaaggagggagttgatttcaatgaaattttctcacatgtagtgaaatacgggtccatgagaattctgttagctatggtggcagaattagaccttgagctagagcaaatggatgtaaaaaacaacttttctctatgggaagcttgataaggtgatactcgcaaccagagcgttttgtagaaaaaaagggaaagaggattatgttttcaaattgaagtcataagacaaattaagactctcaattgttttgatttggtgaaaataaatattagttttaaaagttaaatctaaaatcgcatacaaacagagactgttgagtctacatctgatggatcaaatgatactagacatatgcttaagtctttagcatttaagatcaagttaatggatgtatgcttgatcctctatgcaggcccaaccctgaacaatgtttagaggtacactaacactaggtccataaatttgaggggcccaaaattttattttgctataaaataaaaaaaaaacattttaatatggcttaccaattctcacactaatcaatcaaaaaaaaaaaagttcaggcccactcaccctttcagcttcttctccacttctcaatatagtgcacccgatgacaattcccaaattccaacctcaaatttgaaggttacaagcaattgaacattgaatttccaaaacattattcgatagcctacaccaatttctaactttgtggaaatggtaatagttttttttttttttatgataaaaggtatagaaagaagggaactatagaatggaaaactcatagaaaaaaagaaagagtagtacactgaatattaatatcatattgattataagtcgtgactatcattgccaactacatctgaattgtgatttcctttctaaacttaagccaacaagtcaaggaggaaaggaccaaatcgcaaagaaggtcgagaacgacttcactgctagtgtcacgcgtgacgattatagattacctagtggattattaaactccaaggcttgaaattcaaaggttattttcgattcattcgctctataatgtcattcctatatatatatattaatttgacttgaataattggtgttggattgatcaaatgatgcaaagtgttgttttacttgctacttttcatgatttggtattgttgttgcagcttaatatttaaagtgaaataaagcttgttttgccttaattaagaaattatattatatatatgttattcaataataatacaatgtttaatgagattaagtatctattttatttttcaaataatatttgttttaaaataattatatataatgggtctttatttattattttgtattgggcccataaaatgtcagggccgaccctgtctctatgcaaggaatgtttgaacgttcatcataagatttatcaaagagtgataaagagagaaaaaagtcaaagattacaactgtctcttacatcaaaaggtgtgttatatcatacaacagtgtacttcatagtacaaaagtttacctgctttaggacgtcgataaggagtcctttacaaaggaagacaagcaaaatgtttttatcaatgttaagtggctatttggtgacaatcattaattgttgtatttaatggtccaatgaatatgtaattattaatattatccaatatgtaattaattatttttgtttaattttaattttaatttgaaattgtattgaacaataatttttatttgttaacttatttaataatttatgaactctaaataatgttataattattagatgttatttatttccttatttaataatatattgattatgttatttaacaactaaaataatgattgattttttgaatttttttagttattattttcagatttttgtattttctttgactactaatacaattaaattcattatcagttttgattaataaaccattaattaacgaatatttttaaaatatttatttaataatcagtatattcctttacagttataaatgatttgtctaccatttattattgtcttattgataaaatcttaatgaaaataaattattttttcttatttttttacataaaatacatctttatatatttatttaatatattcttaatttagtaaatatatttatttaattattttattaacagtgtataattttttaactaaataattcttacttatattgaattttatttgattataaacttaatgttttaatattttgttaacggtcactaaaagtttaatggataaatatttattattatatcaatgatatacacgaagaatattggttaaaattttaatgaatcaaagacttctcaatagtaagtgtttgttttttctattacgatggaaaacaaaaaagaaaaaaaaatcaccaagtatattagatagaatatatgaaagcaaatttgtattcatacaaaaagcttttttttcttttgttttgttctttaaaagcgagaaacctgacgtatgttgatttagtaaatcatacgatggaacaaaattattttaaattgattaaaaaatgacacacgacataatattttgagataactaattatgtgctttaaaggatcttttatttatatgttggttaacatgtaagatatgcaacacacattaccttgcctttggaaaatattataaacagaaaacatgaaaaaaatgatacgatgaaaaggacgtgaaatcgttataaaagagattttgtttgacttaatgtctcaactgacaccaacttgttataactataaatgactctatacaattgctaattccttatgtagtttgatttaagtcactgtcaattcttattcttaaatattctattcaaatcattatctgtatattctattaacatgctacaacaacaaatggaaacaaacttttttcacatgtgtatttaatctacatttagttatgccaattatgtcgctacaaaactttctattataaaagcaacaaaactccatatatgtacaccaatttatcttaaagattgcttcgactttcaacaaagaccaaaaatgacatcatgttgaatccttcattttcttctcatgtggtatgcaatatttgtatctttttttaatcacgtgtttgaattatatgtaattaaacttaccttaaaagaataacatcacaaacataattcatagttaattctgtaacactacttgtttatgttcaggataacatgaagtttatctctaatgcaatgatactttctttctcaatactactgttgctaccaagtacatcatattcactatatgaaaagcctaaaaaccatatcaagacaactactattgtatctgagagttttgaaatgggaccaggatcaattgcaacaaaaacatttaaggatataaaatttccgaaaggtcatgttggaattaagagttttgatgccgaactagttgatgaagaaggaaactctataccttcgtatgaaacttaccttcaccattggtttgcaataaagtaccacaaaaacattactatgtcattgaatcctaagcttcgtcgtcctgaggatgcttttttcaaaaggaatgaaggcacatgtaatggtggtattcttccacattattggggatttggagtggaatcacgaggaacaccgtcaaacgtccctgatccttttgctatagaacaaggtaatccaacaaaaattaaaaagggatatgaagagaaatggttgctcaacatcatggccattgatacacgtggtgcacaagataagaaaggttgcattgaatgtagatgtgaccatttgaatctcccaaaggacttttataatgtcacaagagatatacataaccaaccattgactacaaattacaaaggaggtctcttttgttgtcatgacaacttacaatgcaaacaaatagagggttttcaaggttcaagaagaatggtttccttaagatacaaaattagttgggttgattggaacaaataccaagtaccagttaaagtttacatacttgattccaccgacaaaattagatcaaatggttccaaaataattcatgattgtcaggtagacaagttattcaattaagatagtactttgtggaaaaaatagacttttcaatctctattagagtgagtgaacagaaatcaaattcctaattccttgcaggcagaatataccattccaggaaatggtggtggtgattctcctcatgtccaaaaggcaaacatcccaatagaaaaaggaggttatctcatctatggcaccgctcatatgcattcaggcgttgtaaatgcaactttatatggacaggtgatgaataacattttcattattcttatatacttcttttgtgattagttacatattaatttttatgaaatattttgttcatgattttttgtgtaataaatttgcttattctatgtcattacaaaaattcatatattgtaatgtatcttgaattttgaattttatgttatcttgtcatttaggatgggaggacattatgtacttcaacaccaaaatatggaacaggaaatgaagcaggaaatgagaagggttatctcattggaatgtctgtctgttatccacaaccgggttctatcaagattcatgatggtgaaattttggctctagaatctagatataaaaatgagtttcgtacaggagctatgggacatttctacatctatttggcagaggaactaccataaaaataaaatgtaatttgtaatttcctccacttgttgcttagtctcattttgcgataattggttcaagacgacatgaatatcaaaatttcttttgtccttagcttacttgatatagattttttttgtttcatatatcatcaagaggcccatgaaagagaaaataacaaaatactaaagatcatacattttattcttctttttatttaatattcaatgtctaattatttaaaagtgtattatttattttgttccaaatatgttttcattatttcttatgaacatcattcctaatttaatttgaacccactcacatactacttctttcgatctttatgaataacatatatattttattttattgttcattttttttatctttaatgacatgatttttcagtagttaattataggcttcatcattttctcttacttttgaacaataaaggctcgacatcataggtcattcacagcatactaatgatgaggacaacgacaatgttataaaaatattaaagataaatatttttattatcatattcagccaataatcaattcaatggaggatattttaatttagtaagacaaaataatattaaattttgttacaaataaacatttttattaaataagaattcatgtcttcttaattaattacgcactaatatatgttgactttatatcatgtaaaaaataaatgaacaatgatttactcaaaaattaattatagaaattaattttattcatttaaaaattttcaaaaattattattattattattattattattattattattattattattattattattattattattatacacatgtgttaaaaattaaattcaccctcataatttagatgttaatgtgatttcaagtaaattgttcttctccgtcatttgattgtaaatcttcctacttgatttttcagaagaaaaaaaaaacattcctcgtgtattttattttacatatcattaagaacaatcacaaaggatgcttattaaatttacttcttttttatatcatgtaaaaataaatgaaaaataattttcttatagacatttattttattcattaaaactttataagaaattacttttattatagcaatgagttacaaaaattattgtcatcctaataattatttaaatattaatttgatttcaagtatattgtgcttcgcaatcagtggattgtaaattttccaacttcattttacaaaaaaacaagtattattccccatgaattttatttcgtataatttcaaaaaattacaaagtgttcttgtctaatttacttcttcttttaggccatgtaaaaagacataaataattatttacttaaattttattatatacattaattttattcatataaatatttataaaaaaatattattatttataatagcaatgtgttacaaaaactatttccatcctaataattattgaaatgttaaagtgatttcaagtaaattgttctctcctatgagttgagtgtaaattttcctacttgattttgtcaaaagaattctctatgaattttttttgcatgtaatttaaacaaaatcacaaaggatgcttcaataatatacttcttctgttggattatctgaaaaataaatgaataataatttacttaaaaatttactaatcgacattattattattattattattttaggaacgatttaaaaataatatttttattccataatttagatgttgatgtaatttcaagtaaactgttttcaattaacaatttttttattttcaatggttctcatattcttttatcttgtaaagttaattttttattgttgcatccattctagattaaccttaaaatcacttctcagcaaacttaccaagataaaaagtaattcatattataattaattaaaacactaatttattacttctattaaaaaaaacactaattggaaattattaaaataatttaatttttacaaaataaagactcaattaaaaaatagacatttaaaaaatcataaatgacaattagggatagcaaacgggccgacccgcttttgcaaagtgggctaaaaatgctagcccgcccctctttaatgcgggccagcaggctagcgggccagcccgcatcaaaaataaaaaaaaataaaaaaaaagtcaatttaaaaaacaaaatacaaaaaaaaattataaaaaaatacaactatgataatgaaaaaacacaaagttaaataaaagtaaataatttaaaattaatgataaataaatgatgttatgtgataattcatagaattacaccatttgcaaatggaatttacagttataaactgtccaaaagtgtaatatgctagtgatgaaagattatttgaaagtatcattatcacaaccattttaatattaaaaattagaagttaattatgagagtgcaaaaaaatataaattaaaagaatatacctatttcaaaatatgttaaatatatttatttaattttaatatttaatattcaaataatataggcccagcgggttggcccgcccgcaccgtgtttggcccacaattttgtgggtcgggttgtcccgtcccgcttttgatttgtgggttgatattatcaacctagcctgcgtatttttgcgggctgacccggcgggccagacccgttttgccaaccctaatggcaatgtcttcttgcgaaaagctcttgtgtctcgtgaatgtcaccaagttggccaacgactcctctccatcctcaaattgttgtgccaactttgccacaaacattccccgaagaccctgtcctcctcacctagttcctcccctcactattcttcttccactctcatcgttttgaccctgttcgtaaattccgcactgagtaagtacacatttttgcaattctcattgtttttggatgatcatttgcaaaattaaatttgtaagtgattcttatctttctttcatttcaaactaagtttgaaagttaaattgaaataaagctcaatttacaaccaaatttaactgaaattaaagaaacatttttagttttactttttgaatggacatcaggtttctgaaattaaagaaacatccccttcttactaatgatgacgacaatggtataaaaatatcaaagaaaaatatttttattatcatattcaaccaatcatcaattgaattgaggatattttaatttagtaagacataataatattaatttttgtacaaataaacattttttttataaaataagaaaaaaatcatgtcttctttattaattacgtactaatatgggtctgctttagatcatgtaaaaagaaatgatcaatgatttactcaaaaattaattatagatattaaatttattcatataaaaatttaacaaattattatcattatgattatgattattattattattattattattattattattattattattattattattattattattattattattattattatacaaatgagagaatttaccaaaataaaaaaattatacaaatgagttaagaattattttcaccctaataatttagatgttagtgtgatttcaagtacattgttcttttccaagtggttaatataaatttttctacttgattttgaaaaaaaaaatcaaacgaaaggataaatgaaactctaagttatgtggagttgccaatcaacatcaaaagatatgctctattgtgatagacccgctctgactcaaagggattggttttctgctttaggattcaacacgaaagcaaacaaaagtgattttccagcatgaagaatgacattcatttaatgcaaacattaaatgctccaacggtcttaaatataagacaaactcaattcaagaaaattattcatttggagagaacgaacacttaaagatgcatactgatgctctattattcaaatcctttacgtaaaaagttttctatgtattcttgtaaagtttaaaagctctcaaaacagcttgaacaccttgagagaaaagaccaagtgcttaagatttcatatttgtctataagacgattaagatttagtccatgagcaaataaagtaaacaaatattaggatttgtttagacccagtaataacttggtcggaaaaagaatactggttttgttcaagcttggtttgaagcttggaatataaatttttatgtggttgtgacaaaccaatatagatttttatgtcttatattttttttcttcattgtgctttaaattgacctagggtttgattttttttttttttgtttttgaaaacttgttttggtaaaaaatctgatttcatagtcttactaagtcttttgtgaaaatctggtatctatccttcaaagttattttagatgatagcttggtgttcgaaaaaaaatatttacaaaattattaaaatcacaaatcaacctccctttttgtgatatttgtttttatagtttgttatcagagcttagtctccaagggttgagcacctgatagtgtgtagaggaaaagatcttgatgacacataacaacaaccacagtcaattcattcttataggagcatccctcacaaggccgccatgcttcacaggggaggactatccttaattccttattgaaaggatagaatggagatgcatatcaagtccactgaatacaaagtttggctaataattacagatggtgacatacacattactagaccagaagctgatcttggtatattatagctaaatacaaaagtttgttatacattgacatacgccatatccaataatgagtataacaagatctttagactgaaggcaatcaaagagatataggattcattgagcatcaactatgaaaggacaaaagatgttcaacttagaaacgttgctactctaacaagacactatgagagtttctccatgaaagaaagagaaacttgaagtacttgtaaatagacttgaatctctacgacactctttctctaaatctcagataaacttgaagatgctagacaactttcctaatgtttggaaccaaacacaacagtcattcaagaagctggaaatatgaaaactctgtcatgagatgaactgttggtatccttagagttcatgatgtccatcttcagaacaaagaagaaaagtagagctcctctaaagctcttaagtgtagatggttgagtttgatggctcagataatagttttggaggatccacaaatgaggaaatgactctcatgtctagaaagtccaaacagatgtttaaaaagaaagaaaagttccaacactcctccataaggaaaaacaccatatttaagaagaaatacaaggagaacaacaagatcatcttatttgaatgcataaagctgggacacatgaaagtaaagtgtcctaactaaagcaaaagagatattttggtgacaagaaatagaaaagtttgatggtcacctaggatgactcgagtaatgagaagagcactagttcaaacaatgaacaagctaacctatgtctaatggccaacacagatgaaaaagttaaggtaaacacctattctgaatctcaaacctcttccactacttcattagatgatgaagaagaaatgtcttataatgctcttcaaaattattaattgatttctttgcagtgtaaaaagtttgaagaaaaatataaagtatccgtttatgaaaacactaagttaaagaaatctaatggagttctagaaaataagatccaaactctagaaaacactgagtcaagccaggaagacagacaaactctctatagttgagaaactaagaggtgaggtagtttgtcttacaagactttgtggaaaattttcgtaagtttaaatactctaactttgcttttaaaattccatcaacatccccatgataagtctggcttaggcttagaaaaagaggcatgcatcttcctccaagatgcagtcttattcagataaatgtgacttctatggtaagtgtggatattccatgttccgatgcgcgcatccataagaaaaaaacaaaggtctaagggtattaattttactggacccaaaaatttttaggtaacaaaatcctatattgtttcgattgcagatatccttggtaggaaaaagcaagaggtttaagttggtatttgaaaagtggtttctcatgacacatgacgggggaaaggtttatgttcctcgatctaaagccacttgaaggagaagcagttgctttttgaggcatggacaagtgaaagactactaatataggtaaaattggtatgccttctctagcctccatagacaatgtattgtatgttgaagggctgaagtatactttactaagcataagtcaattttgtgacaataattttattgtgtccattaataaagataagtgtatagtcaagacataagatgacaagtccttccttattgctagcattacatgaatgttttatagtttgtgtgcagatcatgatattaatgttttataacatagtttatagtgtgtgagtattgttgctctatttttatttaagcatgtgaaaagtcttggtttttcttcaagaaagctccaccagatcctgtcataggccttttctagattaactttgataactagagtgtttgtctttagtctattgtttttaatgtgattaaaggattcttgagaaaggataacattatcttgtgtgcatttagccggaaggaaactcccctagaaaggcccaatgagatctcccaggagtagtccaagtcttgcaactaacacctttgtaataatcttatatgccccgttacacaaactgatgggacgatgttcctttaggttggatgggaaatctatctttggaattagtatcaacatagtatatagtagggatttatccactcgtccatgaatgaaggcataggccatcaggtgccagataccctttccaacaattaggggtattcatggttcaagttgcattgggtttggctaaactcattacccaaccagatcaaaattttgtgggttggatatggtcaggtttgtgaaattttattatggcaggctcgatctaaaccaacccaatcatacacgagttgattggattagtatcatcggatttgtatatattaccaatatttagaataataatttatttttgtgaaaatattttactaataaagttattgattttaatgctgatacaatatttttattttagatagaaataaaatactatgttagattattcacatgagaaaacttaaaaaataaagacggataaaaacaacttgaaaaaaatcactgatggttttatttttattttaataaactatgttagctaaaaataaatgtgttttatatttaataattaattcttgtatgatagtaaatttaattaaattttatggattgaattaggttaaaaaataaaattcgttatcttatcagtacatgaatgggtctaattaggatgagaaataagaagcaaaactataatttcttgatatgcaaaaatgtgttggacatgaatgttcataaaatatgcaataaaagatttaaaaaatagtatgagacaacaaattaagaaaaaaaaaagaaatgggatggataaaataataggataaataaaagaaaccaataaaaacatatgtacccataaacaatcattatatataacattcagagagagaatgaatggaaaaagaaaaaaaagaaggaaatccatcattgctacaaagagagaatccacaaacaaagagaaaaggggagaggaatatcatcgtcatgcgttttttgttacaacctgataagtagaaaagaagaatggaagaggggacatttcttcatacaaacaaaaaatactttaatttgttagggtgcgtcccacatacaacaaatgatgtagagaaaagaagacacaaggagaatgagtttgccattcccacaattcccacgtgattgctttgcacaaaaaaatcttaaatcagttagtgaaaatactattgttaagtaccattctattaaacaacaacaacaaagaaaccttgctcttcaaatattttggatgagaaatagggtcctatagtctcatttgtttaaagaagaagaataaaaaaatgtaacaaaatcaaaattgtttattcatgcctattgatattcacacaattaatacaaataattcctattaatgctcacatgttaaacaaacaaaattagcaattattgtagacgtcattaagcccaaaattattgcaaacattaaaatatttttaataaaaagttaaaaccacttaaataattcctattctttcagcacactttttgtttatttttccttcatttactcaccaatgcaaacttttttaactccattaatttctattgatttttgttaatgctttttcaatcaattaaaccattttttacacttcattattccaaaacaatatttccaaaactatctccacatacttccttagtaattattttcactctaataattatttaattattaattccatttcaagtaaattgttcttcccgctaatttgagtaaaaatttttgtatttgattttgtcaaaaacaatttatgaattttcttttatataattttaaaaaatcacaaaggacacatatatatttacttcttttagatcatatagataaatgaacatcaatttacctaaaaatttattaatagacattttagatcataaattacttttcagcaaacttattaaaataaaaattatttctgactaaaataaattataacactaatcgattacttccataaaaaagttaattaattgattacacatataaccaattattaaaataatttaattttcacaaagactaaattaaaaaaaattcagagtattcatcaccgttgtgcaacaccaatttcaaacaaatctccttctccgtcttctttctattcttcttccaccccaaaccaaagcatagaaaaaacacaatgacactgatcctctcttgctctcaatttccatgcaaattctgccaaactagcctttgtctccttttcttctctcagcgatggtcgtaaaaacaatgtccacggcggcaacttccagcgaaaagctggtgagtcttgtgaacgccacaaagctcgtcatcgacatcccttccaagcacaaatcattgggatagatgttagttagatttcatagatagttgatgttctctagggaatcatggttttaagacatggtttgcgaccatgatattggccacaacttccaagtttttggggctttccacaatcacattacaaccaaaattgtggccgcattttcctgcaatgtcaaggattgcgccgaaaccacaactgtaatctaaaacctgtttgtaaattgggggaaacattggttagtgaattggatatatttatgaatcaagaaacaggaaaagtgaggcaagttgtcacgataataccaacataatttttcttgggtttatgatatgttgaaagggaccacctatccaaatctggttttaagctttaaatatttcaaaagcctttgacttctatcaacctgtgttttatgcctcttctgggtacagtattataactagaagtttagaatatcatatataaagtgataaagcaagcattctattcatcatttcatatatggagttgaatgttggccagcatataggcaacgtgagcataaaataaagaaaacaaaaatgagaatgttgaggtggatgtgtggttatacaaatattgataagataagaaatgaagatattcgaggaaatgtagcagtagtatcaatgagtgaaaagatgagggaacatagattgaagtgatttggaaacataatgagaaggcccctagatgctcccgaaagaacaagagtttgttaacaagagctcaacacaaagagagatagaggtagaccgaaactttcctggggaaaggtagttaaacaagacttaatggaatgaaatatagattggcagatggcaagaaaagctataagcttggtggaggattagaaccgttgttatatctctatgttccagttggtcccttttttgttattttcctcttcatcttccccctccttctttctctctttttttcttttaccttatttcctctttcccttccactttgtttttcaacctccttgtatccatcattgggttcacctaccaccgaccctaattagcttaggttaaaaatgttgttgatgattagatgatcaatatttacctcagaatgtgtgtaaatactcctcatttgaagaggaaaaatatgaatgaaagagaagtattattagaatttaaattttgacatggtatcaggtgttacgatcctgtactgaccagttcccttcttttgcctctcttcatcctcctaccgaatccccaccaaataaaccgtatcctcgttttcttctctctaattcctaattctcccacgcataactctacttcacctttggactctacctcgtctccatccaataaacaaccttgccaaaaagttctgaataaagctctctccacgtcctccgatctgattttctctcgtactcattcagcacatgctagcaatcagcacattattaagtaagtctcatgctttctctgcactatctaaaattgattcctggataattgatgcaggtgcttcagatcatatgattcatgatcatactcttctgtctaatttcttttcctcccctaaaactatgatttctacggctaatggtggcatctctaccattattgttcaaggtttaatcgctctttctcctcggttacatcttcaatctgtcttagttgttccttctcttgactttaatcttctctctgttagcacacttacttctatccttaactgctctgtgatttttttgccttctcacggtctgtttcaagacagccaaacacagaggattattggttatggtgttagatagggcaagctttatttcttggatgtttctcctcgtggcagtgatttatcttctggggcatctgcaatgtttgctgtggataacgctaaagataatgtttggccatagcctaagagacttggtcatctttcctttagttatctcaaaaaattgtttccccattttttgtctgctgtcaatgttactaatttccattgttcagtttgtgaatgggctaaaagccacataattccttattattcaaaagcattattccatttcaagttgttcattcatatgtttggggccctgccaaagtctcttctttctctaaatcattttattatgtcaccttcattgatgactgtactcgtatgtgttgggtgagtctcctaaaacataaggggaagttttttcttgtttaattttttttttgcatggttcaaacacaatttagtagcaaaatacagatcctttagtttgataatggcatggaatatatggatggtgggttcaatgcttttttcgtcttctcatgggattaaacatcatacctcttactcttatacccctcaacaatatggattgactaagagaatgaactgacaacttttggaatttgtaagggcctccttgtttggcatgaatgttccttcttcttatttaggggaggctgtaatctctgctgcatacctcatcagtaggaccccctctagtgtccttagtttccaaacaccttaccaagtttttacttctcactttcctacaccccactccgctcctaaagtctttggttgcaccacatatgtccatatccataaaactcagcgttctaaattagatccttgtgctaaaaaatgtatctttgttgggtacttcgatgttcaaaaaggttatcgttgctttgatcctctctcacaaaatgcatgttactttagaggtcacttttagggaaaatgagccttactattcagggggagtctccacttctccttctcaggaggagaattccttgccacacattacaagtaatggagaagaagtttggttctccactcctgtaacaccaccaaatatctcactccctgcctcaaatccacacaatgaaccactagaagcagctcctatcgaggtaaccacttgtccccaatttgagacaccttgtctaacacatataactcaagaatcttctatggttgtcccagatattgaaccagaacctagtacagaagtaaatcttgttccttcttctactataccatctgatacacaccccagaaggtaatcttgaccaaataaaggtattcctaaacaattttatgaagctgaccctaaaatgaaggctaaatattcccttagcaactatgtatctacccaacacttattcaattcatatgtattatctgttaatcaattgtctagtatttctattccaaatagtgtgcaggaagcattggatgatccaaattggaagcaagccatgaacgtagagatggaagcactccagaagaactcaacttgggaactaacacctctgccaagtgggaagaagacaattggttgtaaatgggtgttcacagtgaaattaaaaacagatgggagcatagaccggtacaaatcaagactagttaccaagggatatacacagaagtatggagctcattaccaagagacatttgccctagtagccaaactcaatattgtaaggatatcactttcgatagcagctaatagggattggccctcgaaacagtttgatgtgaaaaatgctttcctgaatggaaatttggaggaggaggcttacatggatgtgcctccaggagtaaaattaactaaatgagaatctagtctacaggctcaaaaaggctttgtataggctcaagcaatcaccaaaggcatggtttgaacatttttctctagcaatgaagatatttgggtacaaacaaagcaactctgatcatactctattttacaaatgtagaggaaagagaataactattctaatagtttatgtggatgatatggtgttaaccagagatgatatagatgagatgaaatcccttgagcaacatctggcaaccgagtttgaaatgagggatctaggtaacttgaaatatccttgggatagaaattgcaagatctcagaaatgtgtatttttatctcaaagaaagtgtattctataaaagatcaaataccttttaatcatcacaatgattactgagttactaagggacttcacagttagaaatttgagttaatcaaatatgatcttcctatgagtctttattgtgataacaaggcatctattgaatttgctcataatccaattcaacatgatagaacaaagcacgttgaagtagataggcatttcataaaataaaaactggatcagtagattatcaccacatcctgtgtcaaatctgaaatccaactagcagatattttgaccaagggagtttcgggaaaagccttagatgatataattgacaagttaggcatgtatgacatccatgcacgaacttgagggggagtgttgggttaggaagttttgaatctaaaatattgctgtaaaaagtttaaatttgaatttctatgttcagcatattgttttttaggaagttggtttgagatttggtaggttttatctttgcctcgtaatgtgtataaatactcctcatttgaagaggaaaaatatgaatgaaagagaagtattattagaatttaaattttgacaatttgattgcttctctttctcttagacacctaaacaaatgcacatgcatgcacaaagaaacagagagaaaggacgtcttccaatccaatataatcaacttatttgactgggttttgtttggaagaaaacttacactcattttgtaaatttgaggattgttctaagactattaatcaattattttttattacttgcaattactgctaactgttaacgctgtttgtaaaagtccattattctgattgttactttcttactattgacttctttattagtctatttccagtctatcaaccattgcatttgacaggcctgcattctatggtagcatcttgccagttttgctcagtttggaaccttccatctttgttgttaatggggtctgtgtatcagatacacattttgctttgaagaatgccttcgttacttgctcgaaatgtacacattttgttgaccgagaacaacaaaatctgtcacgagtgatccatgtttggtgtatcaatgagtattacgttgactgctttgtctagcttatttcagagagaaaatcgcttatttttactagcttcctgagagcaatgttgtcaagatcacgatcttactcgcgaactcgtacgattacccgatttttagacccatgctcgagttaactcgctgggaggatcgccaggttctgtgatcgtcgtcggatcgtgaggtggatcgtgacgtggacggattggcgatccgtgccgatccttgctgaagggttacctttaattcgattaagtcgacgcatgaagctcttatcctttcagtccgtctgcgccgctttcattcagaatcgtcattgtcgcagtgctgctcctcgccgctgcttgtggttgcactgcttgtcgccgccgcctctcgtctaagctcctacttgtcgctggtcgtctgactctgcacaagcacatcgtccgaaatcattcctctgcgtccgcgtgagtccagtgccttctttctattgttttattttatccttactattaaaatataattataatataataatataatgaacgcctgattttttagaaactccaccacctccaattcactaaatactactgataattaaaaattattttttaaaaaatataagtataataatattaataccacttcccttctctttaaaaattattattttttaaaatataagtataataatattaataccacttccgttctctttaaaaattatttttttaaagcagtggaactggaagtagtattggatcaaggactgatattgcatggaaccattgtatttcaattgatgggaatgctagaaaactgaagtgcaaatattgtgagaaggtatttacaggaggaatttatcgaatgaagcatcatttagcaagaacttcaaaggatgttggagcatgtagggctgttcctgatgatgtgaagaaattaatgtgggatgttgtttctcagttgcagcaaaatctgattaaaaagttgcaattcaaagaatatgaaagtgtgactgaatcagatgagggtggaaaaagaaaaagaaaagatattgatattgcaacaaatgttttcaagaaaaagggaatgagctctcagtctactatgaatagcattttcaagaagaacttgagggaggatgcatgtgaagaaattgccaaatttttttacaacaatgctataccttctaatgtagcaaagagtgaagagttcaagaagatgtttgaattggttgcaaaacatggtccaggatttaagcaaccatcctaccatgaggtgagggttaaatatttgaagcagcaaattgaaaagaccaatcaggatttggaggaacatagaagatattggaagaaaacggggtgcactataatgactgacggatggaccgataggaggaggaggactattcttaactttttggtaaatagtcctaagggaactgtatttttgaagtctattgatgcttttgacatatgtaagacagctaatagaattttcaagatgatggatgatattgttgaggaggtaagagaagagaatgtcctccaaattgtaactgacaatgcagccaattataaggctgctggagatttgttgatgcagaagagaaagaagttatattggacaccttgtgccgctcactgcattgatctaatgctagaagattttgagaagaaaattccactccatcaagagacaattgcgagtggtaaaaaaattacaacctatatctattcaagaactggtcttgtttccttattgcatacatttactaagggaactgatttgattaaaccagccactactcgttttgccacttcttatctgactttgggatgtttgcatgagaataagagatcacttattaggatgttcacatcaaaggagtgacaatctagtcaatttgtaaagactaaggatggggtgcttgtggaaaatttgatcactgataaggcattttggaataatgtcttaaattgcatgaggggtgcttttcccctaattaaggtgttgcgcatggtggattcagatgaaaagccagccatgagcttcatttatgaagaaatggacactgccaaagagaagatacaaagttttttcaatgagggttactaagagctaattaattaattatcttttactagttcaattttttaatttatattattatagactgtttgaaattttgtttttaccattcttagctacactcccttttgggaaatcattgatgaaagatgggataggcaattgcatcggcctttgcatgctgcaggctactatcttaaccccatgttgtgtaatatcactaaatttaattaaggtaatttgggtgatatttgcgtaattaaacagatttaagaaagtaagggcaatttggtctttgtcggagatatgggtgtagttagtaattgctggacgcacccctatttcttgttaaaaaggagcagattacgttttgtgccatttgcttcttctcttttcttcttctttggtttcttctccactcccaagctctctttttgccacttccacttgtttactggttgaaatcacaaaacaagcaagaaagaaagcccttttctttgttgaaggaacggttggggttttcacagttggtgatacctttgactcgactcactcggaagggagttccgtttgtttggacccatgagtgcgagcagtgtttccaggagttgaaggaacggttgactacagctctagtgttgacccttcctgaccctgagggaatctttgaggtgtattgtgatgcttccaagcgggggcttggatgtgtgctgatgcaggataagaaggttgttgcctatgcttccaggcagctgaagcctcatgagaagtcttatcctacacatgatttagagcttgcagctgtggtgtttgctctaaagatttggaggcactatctgtatggtgctaagctggtggtattcagtgaccacaagagtctcaaatatctctttgatcagaaagaactaaatatgaaacaaaggcggtggatggagtttctcaaggattatgattttgagttgagataccatccgggcaaggcgaacgttgttgctgacgccttgagcaggaaacatgtgagtgccgcctacatgatgatttctaactgtgagttgattgagcagttcagagatatgcacatgacagttacagagggtgctcgtggtcttaagttgagaaagaccaagattgataatgacctgattcggaggatcagagaggcacagaagcaggatgaggctgtgagggccatgattggccagcaggatatttcctgggaggaccacgacttggtgttgtaccaagatcgtattgtggtgcctaagggcaagttggtggacatcgtcctatctgaggctcataagggccactttagcattcatccaggtgccactaagatgtatcaggacttgaagagaagtttctagtggccagggatgaagagagacatagccgagtatgtggctaagtgcctggtgtgtcagaaggtaaagattgagcattagagaccgtctggtttgctacatcctctacagattcctgagtggaagtgggacatcatttccatggattttgtagtggggttacttaggactcagagtggatgtgattccatctgggtgattgtggataggctgaccaagtctgctcatttcttacctgtgaggacagactacactgcagagaagttggcccagctgtatgtcagggagattgtaaggctgcatggtgtccctgagagcattattagtgatagaaatccgaagttcacctctaggttctggggtgcccttcaggaggcttttgggacgcagctgaggcttagcacagcctactatcctcagactgatggtcagacagagaggaccatctagactctggaggatatgttgagagcatgtgccttggagaaaggtactagctgggatagatacttgcctctggtagagttctcttataataacagttttcatgctagtttgggcatggaaccctatgaggctttgtatggccgacggtgcagtttgttggacagaggtaagggagaggcaacttcttggacctgagatggttcaggagacttctgagcagatacggatgatcagagactagttgatgagagctcagagtcatcagaagagttattatgatcataaacagaatctgctgcagtttgatgagggcgactatgtgtttctgaggctgtctccggtcataggtgtaggatgggctttgggtgtaaggaagctgagtcctaggttcattggtccctatcagatttttcagagagtagaaccagtggcttgtaggctatctttacctccccagttgtcagggctacatgatgttttccacgtgtcacagctgaggagatatgtggcagatccatcacacgtggtagagcctgacaccgttcagattagagagaatctgactagtcctacacgacctatgcggattctggatcggatggagaaacagatctggagcaagagcattcccatagtcaaggtacaatgggaatggaggacacttgaggaggcgacttgggagcgggagcaggagctgttgtagctgtaccccgagttgcttgtcaggtatgatttgaattttgcggacaaaattcttaaaaaggtggggtgaattataatatcactaaatttaattaaggtaatttgggtgatatttgcgtaattaaatggatttaagaaagtaagagcagtttggtctttgtcggaggtacgggcaaagtgttgctttacttgctacttttcatgatttggtattgttgttgcagcttaatatttaaagtgaaataaagcttgttttgccttacttaagaaattatattatatatatgttattcaataataatacaatgtttaatgagattaagtatctattttatttttcaaataatatttgttttaaaatagttatatataatgggtctttatttattattttgcattgggcccataaaatgtcagggccgaccctgtctctatgcaagaaatgtttgaacgttcatcataagatttatcaaagagtgataaagagagaaaaaaagtcaaagattacaactatctcttacatcaaaaggtgtgtcatatcatacaacagtaaagtttacctactttaggacgtcgataaggagtcctttacaaaggaagacaagcaaaatgtttttatcaatgttaagtggctatttggtgaaaatcattaattgttgtatttaatggtccaatgaatatgtaattattaatattatccaatatgtaattaattatttttgtttaattttaattttaatttgaaattgtattgaacaataatttttatttgtttacttatttaataatttatgaactctaaataatgttataattattagattttatttatttccttatttaataatatattgattatgttatttaacaactaaaatactgattgattttttgaatttttttagttattattttcagatttttatattttctttgactactaatacaattaaattcattatcagttttgattaataaaccattaattaacgaatattttaaaatatttatttaataatcagtatattcctttacagttataaatgatttgtctaccatttattattatcttattgataaaatcttaatgaaaataaattattttttcttatttttttacataaaatacatctttatatatttatttaatatattcttaatttagtaaatatatttatttaattattttattaacagtgtataattttttaactaaataattcttacttatattgaattttatttgattataaacttaatgttttaatattttgttaacggtcactaaaagtttaatggataaatatttattattatgtcaatgatatacacgaagaatattggttaaaattttaatgaatcatagacttctcaatagtaagtgtttgttttttctattacgatggaaaaaaaaaaagaaaaaaaaatcaccaagtatattagatagaatatatgaaagcaaatttgtattcatacaaaaagcttttttttcttttgttttgttctttaaaagcgagaaacctgacgtatgttgatttagtaaatcatatgatggaacaaaattattttaaattgattaaaaaatgacacacgacataatattttgagataactaattatgtgctttaaaggatcttttatttatatgttggttaacatgtaagatatgcaacacacattaccttgcctttggaaaatattataaacagaaaacatgaaaaaatgatacgatgaaatgaagaagcttaagttctgtgaacattttgtgcatgtcaaatcctgaagagccaagttcagcactggacagcaaagaacaaaagggactcttggctatgttcatgttgatctttggggatcaactaaaaccccttcccattcttgtgccagatacttcatgagtattattcaaggaaggttttgatattcattcagaagaccaaagatgaagaacttgaaaatttcaaaagctggaagactttggtttagaaccaaactggtagaaagactaagagatttcttactgacaatggacttgagttctgttcagaaccgttcaacaatttctgtaaagaaaatggaattgcaagcacggtacagtttctgggacccccccaacaaaattgcttggaagaaaggttcaacagaaccattttggagagggaaaggtgaatgttgctaagtgcaggtttgctcaaggtgttttgggcagaaacagccatgactattgtatatctcatcaacagatgcccttcaacagccttagattttaaaactcctgaacagatttggtcaggtcacacaccaagcctaaaacacttgaaggtgtttggttgtgttgcctttgctcacattaggtaagacaaattggagcctagagatgttaaatgcattttcataggtgatgtgttgcaaacacatcttgtttttagtctagttttaggttagaatttgattaaatacttaggtaaatagcttagaattagttgagtttagtattttattgtttaaatctaatttcaataccaattgtgcaatttcaggtcaaaagaggagaataaataataaagcaagttctggagtgtcacgcgtgtcgcgcaaacatccacgcgggtcacttggaagaccagagaagatcacgcgggtcacgccgttattcaagtgagtcgcgtggaaacctccaggtttaagccatttcagctctgccaatccacgcgaagcacttcacagtccacgcgactcgcatcattcatttctgccgagccgcgcgactcgcgtggtatcgcgcgcgggtcgcgtggaatcaatttagtttccttatttaaatcatataattcaagatttggtattatattaggattagttgccttaattaagtgattctataaatatatttagtttccttaattaagaagatttgatttagatttggaatagaaaataggccttgttaccttaattagatctatctataaataaaggcctctaggaagagaatagaaacatatctcacactgacacacaccacccttgggtgtcatctatttctctcttcacacttctaaacctttggaagtcaagaatcaaggcaaggtcaccaagagtgtattatttgacagcctttggtttcttgaagcttatggcaagctgaacttgtattgtgggaaggccatgaactgatgtaactcctctgtaacttgaattggtattgattctaatgctgttttgattattttattctactctgtgctttttaatgttttattcttatttggaattggccattctatttaagtattgagggttaggattcgcaatggacacgttggggttctaatttctgacatgtttagaataatagtcgttcttcgcctagacatagggatgcgtggctacggactttataatatgttctttttcatgcttaacttaatagaattcaccaagacattggatttttgaattaggttaaagggttgattcactaagacattagggattaactaacttaggaaaggcttattttccgaataatcttaacaagatcacatgagatatattctttgaatacttagtttgacagattcgctaagggtttaggtttctcgatcaactaaagggtgaaatcgctagttaatgctcttaagagtctaggatttacgaatttaggaaagatttatcacgtgtgtgacttaagataataaaccaatcaagtgaaggaggtaggaacaaagggaattgtgcctgaccacaattgtttcttccattggtaacttcttttatcttttattacatttattttaatttctgtttttattcaaccaatcatccaacatcaacaattatctctttgttatttctgtttttacttccaatcatttagaattaatattattgtaaaaattaccccaatccctgtggagacgataactcacttacctactttattacttgttaacgatcggtgcacttgccgtacacattcgcataaatcgcgcaacaataggctatgcaaaaggaattgaaggttacagacggtggaacatgtttaggggttggatacaaaagatgttttgtgagtcgtgatgtcactttcaatgaaggtgagatggcataaaaggccaagcttggtaatgatcacagcagcactgaacaacatgaagatactaaccaacagtcaatcttgaggtggagcttgagatcaaaacaactgaagttcaaggaattgacacacctccggatgaagaggattctgaagatgagcacagcgaagaaattaaacagcggcctgctagcttgagatagaaccgaaagggaaatcaagccacctgagaagtgtggttatgcatatttgattgcttttgccctgggtaactgctagtgaagttctagaggtagatcctatggatctaaaagcagtcctattcagcaaggaaaagaaaaattggttgagtgccatgaatgaagacattaagtctctccatgacaatcatacatgggagttcatcaacaaacctcctggttctaaagtggtcagttgaaactggctctttaagaagaaagaaggcatctgaggtgatgaacaagctagattcaagtccagacttgtagctcgaggatgttgggtatgagtcatactttttgaggtctggtactgttgtgggcctggggtttattatttgtagtttgtacttgggcctataaatagctacggtacttaaggtttctaaacatatatatttccttgtaatctgagtgcattgtaatgagtgtgtgaggagaatatagaggaaaactagacgtagcccacattgggtgaatcagggtaaacactgtgtattatttttcctttcctttctctctttcgtgtgattgctcgataccaacggaggattctctctaaaggagggagttgatttcaatgaagttttctcacatgtagtgaaatatgggtccataagaattctgttaactatggtggcagaattagaccttgagctagagcaaatggatgtaaaaacaacttttctatatgggaagcttgatgaggtgatactcacaactagagcgttttgtagaaaaaatggacagaggattatgtttgcaaattgaagctataagacaaatcaagtgtaatggatcaaatgatactagacatatgcttaagtctttagcatttaagatcaagttaagagttgtgcttcctacaccatcaattattctaatacacccagtaaggaatagttgaattccgaaaataaccctattaaaatttcacacaacatacaagcttttaaaaatttccaatacaccatacaccatttgcaaaaaatttcatgagcctcttcctcttcgtttcttctcttccgtgtgcctttgttctcctcttctttccgagtagttggttattgctcgcagccatcaccgttttgagtcttcctctgccgtcagtcgtttcgactctatcgtcaccgtgactggttccgcgatagaggtaagtcgcatcttcttctccgtgtcgatatttgatttggccatacggattgcagatctgtaagatggaattcgaataagtccatacctattggcaatccgtatgactcttactgattgacaatccgtatgtaccttatggattccaatccgtatggaccttacggattgacaatccgtatggaccttacggattgacaatccgtataagtcttacggattaccaatccataaggtacatacgaattgccaatccgtaagagtcatacggattgccaatccgtatagaccttatggattgccaatccgtatgaaccttacggattgccaatccgtttgaaccttacggattgccaatccgtatgtgtattttgagattttttttgaatgcaaagagctttcagccagcaaatgaaattgaaatgtgttaaattgcttgagtggaccttgtttgaaaacatgtttctctggttcctccaaggaacacttaaccttgtaacaatttaggagaaaaatgattatataagagcattcattgttagactattttcaggaccttgttttgttgctttcgttgttctccttgttcttcttggaatgtttctgccttgccatttgttgggtattttgaggacctacaactgctgtatatctcccgttatgtcagttgaagtaatatatctatccaaagccgacgttggccatcatattccccaaggaaaacctctattggttagaacttacacacacctctagaaaccagttagtgaagaaggatcactggttatagttagcaacttctatttagtttttccatcaaaattcaccacttaagtgagttgtgattctttagacgtcaaaaaactacaaaaggccacataatttggaaattggctgacttaatcaaattcaacaatagataggaatgaagataggacagataggaaagtaagatgcaaccatcttcgaaaccatgcatgagtgatcaaagcacattcaaaaccaaaacatgtattaatttaaaaccatcttccatgtgtgctttttattactcatttggtttatatgtgtaatttcaaataaagttgttgtgtatttatatatgtgtaagataaataattgtgggatgctatagtatttgtgatatatatgttcaattaattaaaggtaaagtaacgtgcgtacctattattgatctcaatgttacactaatatgaatgcatgtgtatctatgcatgtagcttgtgatagtactttaatattagcaattgatgtacattccgttagtgccaaaccaacaattccatggtgtaatttgttgttgcacacatcacagagatgtagcttgtgaatactggttgtgtaattccatttttatgtcaaatttattgaattgaaacaattgtagaattatgtttatttcatgcatgctgtgtaatttgaaacaattgttatcactggttagacatgtaaagttgtcgagatggtgatgcatgttgtgtaatttgaaagcctagtatgatatgttatgttatttaacatttatcaaattgtcaggttatggttaaaacgttaggattatgtcgggccttggctagagaggtaagtggtgacactgatgaaactccctgcacgctgtaggctacagcatcggcacaaagaaaacgtgcaggggctagtgtagatgaggatgtgcacgtgcctgctgaccaatatgtaggcgttggtgatatggttgcatctaatgagggaagcgttgatcatgaggctgaggttaagggatttccaggaggggcccgtgacacttttgagttgtcactttatgctgatcatgttgcgacgaaagtttggacaggagagatatgataccatcatatttaaatttacttccatttgacaattatgtacatatgtaactaacaaatattacagggatgccctgagttgaagtttggcatctcatgggaaaaagatgcacaaatttggcaggcctacacctaagattgaaggttttgtagcgggtacagggttaagcccgcttatcacctgttggctggagacaggtgactgggatttaatctcagcctttgtggagcgatgacataaggagactagtagtttccatttgccgatcaaagagatgatgatcacgctggacgacattgcatcattgtttcatctactagtcatggatgccttcgagacgtacgatgtgttggatgtcgaggaggcgattgaattagttgtggtgttgcttgaggttaccccgaacaggctgaagcagagatgaaacaatgccatggagcatatgttcatctgtcatggttacgggaattgtatgttgtgaagtgtgatcagatggagtggacagtggcagccagagcatatttgctccatttggttggttgcacgatcttcgctaacaagagtgtcacacatatcggtgtggtattcttggaggcatttcgtgatctccatcaggctggtggcttcagttggggaacgaatgcactccaacacatgtacgataacttaaactatgcatgtcagcatcacagtaaacatcttgctggttatattagtctgcttcaggtattttttacaatttaagttaattttttcatttgtttaatgttttggttgaatttgaactgcttatttgtgttttcttttttttgtgactgtagtgttgggtatacgagcactttcctgcagttgccaacatgattgcagatgaggactatgtggagagccaatcgcgggcctgccgctggaatcctgggaaggcgttacctgtcagtacctatcgaaggtgactagataggttgacgaccgacgttgtaggttggacaccacacactgatcaccatgcgatctgtgcatttgaagccatccatcttttatcaggtcatatccgctggggtccatacattgtcagataccaacaaaagaaggtactaagacagtttggcttcgtcagctaaacaggtcgattagaggtggctccattttttgcagtacctgacagtcaccagagccccttccagttaacctggtcagtgtgatgctgcatatttggattggttttaccaaatatcacaccctttcatgaccccgccacaacttagggaattgagagctcctcccgtcgtgccagatcccgtaccagattcaccagctagtatgacagagccaccacttgttcatcaggcagagttacctgaagctgatgagcctgacatgccacgacatgcagtggtaagtgaaactgaaactgtattccagttgattgtaattttcaatattttatggccttattgtcttatatggttttttcatactctattaagggcgcgtgccagaccattgcagggaggttgcaacagttgatagatcttcgcatggttactgctggcactgatgcatacagcatagtggagcaatgtatcacattagcacgcagtgtatgtgaggattagagagtctatgtgctttctagacgtcccaggaatggaccgcggcaagtttgggttttgacattgtttgtacgacgtatgccaatatataaacatacgtgttaacattatgatattgtttaaacatttcatttcatagttttaaataaacatcatccatcagtatttaaatacataattccatttcacttgtgtgtttaacaccccaaatccacataatgagttggtattctcgtcaaactggcatacttctgcattcgactaatataactagcgggccattcttttgcctgtgaataacaatttcttgaccataacaaagcagttggtggcataggacatccgtcttgtaataatacctgaacaaaatcatgatccagactgttattgtctggctatattccttgtagtcattgtaaacaaataaaatgatatgagtaatacctgaacaaaataatttccatagacatgaccaatacaaattaccctatgtgcaccagcatctctaggcggttgacttctaagagggaaaaacgtcatgctttgttggagagaaagacaaacaagtacaaggttataccatgaggcaatgacgtaacctatgtcagtaatatccatccatttatcaattgttgcctgccaccacaaacaacttagaacgttaaaccgttaaccgataaaaaaaagggattagtatgataacaagcagaatcatgatatgcatatacaaacaaagcataaagcatgtacctttgacaactcatccactaagagtgacctctttaactgttcaaatttatgcaagccatcaaacaaggcaatatactcatgagaccattgtgcaagttctttgagtaaatgattgcacaccacaggccatgcatctacaccataaccatgtaaggccgcaataacacgataactgcagttaccatctgctttaacatcgattacatttaaaatgtagttcttcatgcatgggagaaattgatccagcattggaatattacgcgagggtataggtcctgtagatgttgatgcagaacggggttgagatgagcaactatcatgctgagaatgtaatgcatccacgtactcaaagtacgatggatctggcttggttgatctttggtgtttagtgacatgtttcttttgagccccctttgtgtttacctttttaggaggaggacacatgcacgttgtatcaggatatgctagttctttgagcttagtattcagagtgactttgccacacatatcaaggcatgcaaaacgctttgatattgcatccatttcttctgttatgtggattttgcactgatcgtcaccctggtcctcgaaatgtaactgcagccaaaatatgtgtacgaaatccaacggtatactaccaagaccaattctagctagctcacacacacaaggcataccatacgtacttctcaacacacatccacaacgagtgcgatcaacacttgcataatcaactcgctcaaactctgcaacaatttcatttaacgcataccttgaaaccatgcctatcagtcttttgtacaaggtaactttaaacgcatgtccaacaacatgtgtgcttctcttaaaagatgactttatttcactgtgttgcaatgtgatcatagcattcatggcatcccaaacattacatagatctcctacgctattcttcaatagtctctttaagttcgaatgagcagactcaaccctacaatttaaaacccatcataattacattttaaaccctactgtaattcttaatcagcataataaaaaatgttttacgattgcatacctattagttattgtgtttccaaaatgcatgaccttattagtacatgtcgttacaaatctttctttgtgcgaattcaaccacgtgtctttcacatactgaacaaagattggccacggtgcacaagcacattcaaacttcataagacaggcttcatattctttttcagaatcacaatctatgagactcccccatgcatccatgacatagtcctatgcattgttttgtcccacaagggttttacattttgccttcacattcttgtcaatgtggaaccgacacagcaagttggctgtgtttaggaaaacagtcttcatagcattcatcaaggctgaatctctgtcagtaacaatgacttcagggaaaacatcactcttaaaaaaaatccccctaaatcgttcaagcgcccatacaagattgtttatatgttcaccctccaaatatgcaaaaacagctaaaaatgtcattccagtaggtgtcacaccaacaatgtccagcaaagggagtctgtacctgtttgttttgtacctattgtctatcaggaataccaaatgacatgcatttatcaacttcactgcatctggatgtgaccagaaaatgtcatgtacaacattttcgtcctttagtctatgccagtggatatacatatcgcgttcaagaagcttcatcaactgttgtatttcagtattactgccccttatagaagtacgatacatatatctggcattgtaaacttgcttcaatgttgtatagttgttcggattgtgatccttcaaagttagaagaatattcttagctttcacccttgactttgtcatatcagcaacgataagcttttcatcctcagtcaaacgaccaacatatggatgtccggtgaatgacttagccaaacgatggttatgagtcccacatattaacttcaccatccaacctttaccacccaaaattggtttcgatcgcaacttaaaagaacaatcacactttctagtgctagtcatcgtacgcactaaatctttgttgaatgctcaaaattttccactcctttcacaaccgattaaaataaatgaggttcttcctctttttccagttgctatgtcagatctcataatcacgactacaaagtccatctcatacgcaactgtacgagcccattgcaatacatcttcacgagagttaaacacctacaaaaacaccataatacaagttaaatcttctcaaatatttaatcatgacaccatttagtaaaagacaacgtcataaaaatacctctaaagtattaaaggcatcagaacaatcaacataacacatgttattttcaaatgcagaaggtgcgtctttgttgtcttcaatcatattaatttcttccagcatacttatttctttagacagaatattgtcatatatccaatcatcgttttacctcgtaggctgaggagcaaaaggaggaatccgctcgaggaggggctcgcgtttgattagctagttggtgaggcaatagcttaccaaggcgatgatcagtagttggccatctaaacaaacaatttaaatcacaaaaatattaattttaatacaacaaattatacacactttagaaatacaaaaattctaaattattttgaaactgtgatttttaaaaagtccaaattgacaacacattgcaaaacgtttgcctgataaaccatttcgaaaggtaacatcaaggtcaaaattgacaatacattgcagaacgcatgcctctcacactgtgcagtatatagaaacacaacactatctacaacactatgcagtagaaattgacaacactttgtttgacatgtctcaatcaacattggattccaatcaagctgctataaaaaacacaagacaccgctaacacaactagacactcccacacaacatacctccacaaacaaaattcattctcaaaactatgatattcttaggagaaacaagcagtcagatgattgctaactccaaattagcattcatttttccaaatggatcactgaaacacaaggaaactggtgtttcttttcaatgtcctactccaataccaatgcgagttcctaatgactgtttttttcagacattcaagactaggatacacaacacccttcagctaaccaatgaccaattcgtgcatgaaatctactatcgacaaccatccatagatgcaggtcagcaatatttttttcattgtctgcaactcacaaatgatgatgatgtttgctcaatgttaatgtgcaatgagcaatacccgtgtgttggccctatagaattactatgtaccatcaacagaacacccgataatatactcaacctacttcgatccaccatcgtccctacacatgatgcaatgctatattacaatgggaagtggaacataccacgacaaggggattttgtgggttactccttcactggaacaaatccaattagatttgaaattccttcaagatgcaacattgaaacattgaaggatgtcatcaagcaagttgcgcctgtaggggttaccccttatgaaattcccaactcacaagtggtcagaaaattatttttccgatagccagcccatgcaaaatattcagataacattatcaaatatcacataatagagttgataaccaatgaagacgtcttaaaggtgttagcaaaatccaactaccggaaacatttttgttccatagaaattttagctatttttaacaaactagctacccaacaaccccgaataaccgttgcagatgttgggcatgatgctaactagaatggttcaaatggaagaagatgtctttgttgcacaacatctaagtttggttattttcgtttttcaattgttattatgtttgtctctctgtctctcatctgaattaccgtatgtttttaattattaatatgtgcaactccatgtgtttaaatactacaaatgacatgcattgttccttatttatattcttaattggactttcaattatttttaaaaaatcacaatgtcaatgtaaacatctaagttttgataataataacaacaataaattatttatgttgtgtaaacatgtaagttttacaaattaaaaaaaataaaggaaaaatgtaaacatgtaattaaaaaattaaaggaaaaattttaagttttaaaaattcaaaaactaaaaaaaattttaaatatactcatacggattggcaatccgtatgactccatacagattaccagactagtttcagaagaaaacgtacctttgacgattttccgacgacccataactgctaccaccgccactcacgatcaactccgccaccacagagacaacaccaacaaccgaagacaacaaaacgcagcacaaaagcataaatgaacaagataataaaaatggaagagctaagaatggtgtatggtgtatctgatttaaccaaaacgatgaagggcattttgggaattccaattttttactgggtatataagaaaaatgaatggtgtaggaagcacaactctcgagttaatggatgtatgcttgatcctctatgcaggcccagccttgaactgtgtttaaaggtgcacttaatctaagtccataaatttcaggggccaaaaattttatttcgcatttctgagttgcaagaggagatctacttgtgtaagcagggagatttctcaattacagagtatttactcatttgctatgcttatggtaggaattaaataattttcgtcccataccatcttgcacttgtgaggttccatgtgtttgtgaattggttccaaagattagacaatatagagaaaatcataaagtgattaggttttggaagggactaatgaacaatattcagctgtgaggtcccaaatcatgttcatgcaaccactccccagtccgcagaattagtacaatgttttcttttctaatttagcaacaaagacaattatgttgtgcagttgatggatctataattcacgcaaatttgaatgagaactttaatggaggtagagaaaggtccaaaggtagaggaggcagaaatcagagtcagttcaatggaggtagaggcaattacatgtgaaaaggccaaagtacaaaagtttgctgatactgtgatcgaattggtcatacatttaattttgcaaacctcattgaaacacaatttaatagaaaaataaaatgtatcagatcagataatggaaaagaatttattcttaatgatttctttgcgtctaagggtgttgttcatcaaacatcttgtgtggaaacaccagaacaaaatggaatcgtagaaaggaaacatcaacatattttaaccgtagcaagagcactcttctttgaagataaaatgccaaaaaaattctggaattttactgtttctcatgctttatatttagtcgacagactaccatataacacccagcagttgcaacttcgtcaacaaacttccttcacaacagggtaaaataatgagaacaaacttcatatatctttgatcatgtaaaagttacgtgacattaccaaagaccgtgtctagaacgaattacttttacaaatgatggcagacttaagctaacgtctgaatttgaaaaatccggtgaatccaaatttcacaagctaagcaacaaacacacattcaaaagtaaaaaataagaacaatacctattttataaactaaacatcaagtcacatagaaccttaatttatagagtttggattctgtaaggcactgtcaaatttcatctaggtaacagtaataagttatacgtacattccttctagttctagaaaatacaaataagcactataataaatataaagaatgatgttaagcacaaaaattaagaataatgagctctgcacatgatggtctatgcggtttgaacattgactatgactcccactatgacatccaggtaaaagaactacaacatacctaatattaagcatgatgttaagcaccaaaattaaaataaaaaataatttatataaaagatatatcagaaacaaacttaaggaatatcatccaaaagaaagaaaattttcttgtgcccaaacatttcaacaaagaaaacaaatatattggactaaaaatagtattttgtattcacactaaacgtttttttggagaggttatctaacaattttaattgtagtataaaccttaaaaaaaacaatcaattttaaagttagaaataaaatagagataggctgagagtgatggacatataagaattataatgtatacggatgaaaataaaagatagtctagagagagtatgaaaaaataaggctctcaaatttcttaattctaaattacatgtatgtctgtgaaagaaacatatttctttttaaggctttattatatttttgtttctcgtttaaatttatgaaatgggttcttcttgaatttttactcatagttctattcattttaaagatttggaactttcaaatccaaaagaatggctcagaatcgtgagaatgcagctgcagcagcgaatcccattccggcaacggagaaatacacccgttggactgtagaggaacacaggtatgtctgtgaaagaacacatttctttttatggttttattgtatggttgtttctcgtttaaatttctgaaatgggttcgtggatttttacttcactcattacttcttttttgttttaatcattgtttctttctatttttcaaacatttaattataattgggtcaaagaaaagtgaccaatgacaaaaataaacgtagcaagtgaatttatcttctttgtagaaaagatttcaattgtcttacatattattgttcttcttcctggtttcgatatttcaaattgttttcttgactaatgaacatgaaacgctagcttttggtgaagttgtttactgtaatttaattcaaaaacagaatgatttctttttaatcattatttaggaatcgtggcagaatgtggtaatgcgtttttcttggattttttacatcatttgattgtttctttcttgttgaaattattgttttcaaatattcagtatcttactgccttttttatgatagactgtttttctctgtttttgtttttctaatttttttaaatttttaaataaaaaacagtaaaatataaaagagagatattttgatacacagatttgaaatctgaatttgttatgaaaagatatcatacgagttattcttgttcaattttctatattttatttttttatttattttaaaaaatgaaaatttataatagggtgagacgtatagtttttttctgcctgcaagcccatacatacatttaatttataatgtgatgctgcagtacgctgtgctatgttgtctcacgccaccagcacgttggagaggctcaccttctggtggaggaaatacttttgtgcgtggctagctacttgaagaggaacacaggtacatgtgagaaagaactacatttaattttaactccttatgttgttattgctcacttttaaatttttgcaagtttcatctttttttcttgtaagaattattgttttcaatgtccctttgtttacgttattgttcatctgtttttaagtattgcttcatctacagttaataaaattaggagttttagtcactacttgattaaaacaagcaccaagagttttttttttttttttctttgactaaaagaattgtagttgaacacagagttcacaccttgtggatgatagttataattttttttatgaagatgataatttatataagaattaagttgaacacagttttttcttttctttgagtaaaagaattatagttgaactctttttggtgacattgattatatatgaattcatgggacatgatagaaattggtattcaaactttcaaacattcactatctctttgcctttttacgatagtttgtttcttcatgggaggaggcgtttgaaaaaaatatgtggagacaagatcaagttgctagtcatgcacaaaagttttttctccaccaagtttagtaagagaagtcaatccctccactagatctacaagctttatctatatcatccaacatagacaaaatacaaaatgcaacagcttattgaataaacatgtggcatttatgtgggaccccgtacacgtgtcaatcctccacgtcaatcccgctacatgagcccggacgcactcccattagtagtcaggttgttactctcgacaagctaagtttatttattcaaatattattgataatgctgcaacacatttcaaataataggtacctaattatctacaagctacaaatcatctacaaggtacgagttatctactatcaaattatctgcaagatgcatatctacataataattatatacaagggcccaaggcacacgctcatctataaattatctgcaatatgcatatctacataataattatatacaagggcccaaggcacacactcatctataaatacaagttccatctaacctttcactgactcattcacaccacaatcactcgaatacacagtgatttacatacacaacacatcccactcacactcagtcatacttttctctgtataattgatgtacttacttgagcgtcggagtcctttcctttgttttgcaggtcccctttttttaaaggttgacttatcgttcgacatgcataatttggaacccacctggaccatgtactaaggaaagtcctcccgacataaactggccctaacacatactaaagagagttctccttggcttaaggtggccttagcacatactcctgtgcatttgaagaagatgacgaagacggtgaagtagaaatttctatgatttccacagataaggcaatatctgggatgcaattggagcccaaggaccttctataggtgcgtctaacagaggtagtgaccaagatgatgccaatgaagctggagaagacaaaatctttataagctccacaagtgttgtcatctgatcctaaaataaaaacataaagggtgagtttttccgcctcgtcaggaaaaacacataaagtcccatacacaagtcaaaacacacaaaactagcaataagtccatacaaagttcatcttatcaacacatatcatgctatcctaaccaacaacaaatcatgaaaataaatttttattattcttaaaccattcagccaaagtatggatagtagtctttagttgcatgtcaatgggaatgaaacacgttatttgttactaattcctaaatctagatcatataaaaatgaagtcacactaaaatagtagaataaatcaattacaaggtaaaccccacctggaagtaattctgtagtgtgaataactgaaccaccagcagatcccaatacagagcgtcatatgagattatatgagagaataatttagaacaggatggagaattaccacctgaaaataagaaagacggagaataagccatagaaagataaccttcttgtttattcatttattttattggtatcccattctgttaggcaagaggaacaattgctattcaaatgatctttcatatcttgaatgactttgcattgagaatcccattgaagatcacagggttgaggcaataacatcaaatttatatcatgtatctctgaatgagtttgattcctgtgagtatagccatagatcttgatcaacataaaattgatccatggatggtcttactgtacgcgcatctgaactataactagtatccaataaccctagtgagtcaagtgacttgttactaagttccactagcaagttgaaatcaattaaataacttcttaaactaaactaataatggaagtgtttgtagcttcccatgaatgaatgttttctatttccctggagattctaactgttctgactatattggagctgcatatctagaaggaaagtactgaaatccagaccacgcatcacaagatacaaaataaaagataatgcttagttaagggattagaaaagagaaacataaaggtacttgtggatcaattattatgaatgaaaggatgtttcctggattactattatctctcttgtcttcctgcaaatctgaaaaaataaaggtcacatatatgctaaaagcgcaaaaaattgtccaaaattttggtcaccactcaaaatgtggtgttgctaccattaaaatggaaaactttaggtaggagtaaattttgaagtgggaaaaggtcaatgcaacatgtagccttccagaaataaatttattaatatcgattgaacaaataaatgagacaactagaatgaaaaatttaaaaagttgaaataaaatcataacacaactataatcaatatacatgtgatgaagtagtcacgtgtcagcttctagtttactagtgagtgatgattatgatagtttatataaaggattttgaacatattgtaaacaatgaaataattctcaaagattctctgactcattttctttcatttggcttaaaatgttaccacactttggacaatcactcactcataaaacaaatgattagtggtttctatcttttttcattaatatttgttttgaaaaatgtatttagagtaatttttaattatttatcaattaaacaatttacacttagaatatatgaaaatgatattgttaattaatgtcctaaaaatattagttaaagaattaaaaagaaaaagtttttaatgtgtaaatcatatatagaagaatgtaaagaaactaatttaaaaactcaatgaaaacatgacaggaattgcaactctcgttgttacttcttttgaagttttaaattaaaagatgctgaattatgtatgacagcagttgaataaaacaaatccaataatagtaatttaaaatacagtaaatgacaaatatgtgccaatctgaaattgtgcttttttgtggagacaaaggaaagtgagagtagctaggaaccacatttatattttgagggttcgaggacaatacttccaaaagaaactttgttttggaaatcagatgccttcatgccactaacaggcaaccaacacttatctgtctaggtagaaattgtaaaagatgcttagtgcaataacattgttgttgttttaatgagtatcaattttcctaattgttacggatttgatatatgtgctaccatcatcaacatataaactaatgccagaaacataaaaataaaacactcaacatatatataattagaaatacttgtcatgtaattgagcacgcctcgtacttatagtccacctatcataaaatacctcaacaaaaaatacctctcttcattgccggctaggtttgactttgcctcctcctctgcaatggaacccattttgctcaacttttcttctctaacaaatcttcaattccaccaatgacaacatgaccatttcctgaattcaaagcaccccaaaaggccagttcaacattcacttattttatttactttgcagttgctttgtttgaaatttatattgtacgattgcttggatggtatgaaacacaagggccaccgaagccttcaagccccaatcattatctgcagcaacaaactaatcaaaggttacaactccataaacaagcaaggaaaatcaaaagattgatcttgttctatgcaattttaaattcaaaggtgtcagagaggggcaaaaaataataataaaccagcaagtgtaccaaaattgaagaaagttgttaaagctttccctcaaaactttggtaaagttacattttctggttatctaagatcacaggacacatacctgtatttctataagaattactaggaatggataggagaatgctatgtcaccaaatgcttgagcaatcagccataatttatcaattccactggaagtagggattccttcaatgctaccctcagcatgtccattttctgatcacattattaccaaaaaattattagcaattttttggtcaaaacaaaatagtttaattatcatatactttcaagctagtagggaggggtagctagggggtgttggcacgtgtatgattccatttcttgtggaacacttagtgaagacaagatcaagttgctagtcatgcacaaaagttttttctccaccaagtttagtaagagaagtcgatccctccactagatctacaagctttatctatatcatccaacatagacaaaatacaaaatgcaacagcttattgaataaacatgtggcatttatgtgggacccccgtacacgtgtcaatcctccatgtcaatcccgttacaggagcccgaacacactcccattagtagtcaggttgttactctcgacaggttatctctaagtttatttattcaaatattattgataatgttgcaaccacatttcaaataataggtacctaattatctacaaactacaaattatctacaaggtacaaattatctactatcgaattatgtatatctacatattaattatatacaagggcccaaggcacacgctcatctataaatacaggtttcatctaacctttcactaactcattcacaccacaatcactctaatacacagtgatttacatacacaacacatctcactcacacttagtcatacttttctctgtataattgatgtacttacttgagcgtcggagtcctttccttttttttgcaggtacctttttttttaacaaggttgactcattgtttgacatgcaaaatttgggacccacctggaccatgtagtaaggaaagtcctccccgacataagctggccctgacacatactaaagagagttctccttggcttaaggtggccttaacacatactcctgtgcatttgaagaagatgacgaagacaatgaattataaatttctatgatttccacagatgaggcaatatttgggatgacaattggagcccaaggaccctctagaggtgcgtctaacagaggtagtgaccaagatgatgccaatgaagctggagaagacaaaatctttataacctccacaagtgttgtcatctgatcctaaataaaaacataaagggtgatttttccgcttcgacacaagtcaaaacacacaaaactagcaataagtccatacaaagttcatcttatcaacacatatcatgctatcctaaccaacaataaatcataaaaagaaatttttattattcttaaaccgttttattattcttaaaccattcagactacgaacccctctgcaggttcatggaacgatttggacaagtgactatccagatttgaaacctcaatcccgaggtagacagtctatgcaagagacccccttctagcatggatgaaataagtgaaagagccaagggctacattcagatggaagagatgttgaatttcagaaatgaaatccgacaggttggatagaagcgagagaagcatgagatatccaaccgattcgactctcaaagagccgacaaaaagcgaaagctacacaggcctcaacttctcccaaaaggacaagggtttgaaagatatactcccctgacggtcaatcaaaccaccatcatggttgaaacctccaacacggaggtaaatgtaacttttgcaagtcccacaaagttaggaaaaaatcataacaagtattgtcgataccatcgtggcacaggccacaacacagatgactgtctaacattgaaagataagataaaagagcttatccaagctagaagcttatcaagatatgtagagagacttgataatttttcacgagaaaacaaacaggaagggcgacaaagagaccaatccgaaaacagagacaacgacagaagaagagatgacgcagaagaccaagagaggcaacgacaaccgcaacctagacgcgagcgtcaaccccctcgttagcaagaagaggagcccactaaacatattcgcggtgtaatccataccatcgcgggtagcttctcatatggaggaccgtctagcgaatctcaaaagagacacttgcacgccatacgagacgtagacataaactatgtcaacattcctccattacaaagtctacctccccttactttcactaatgcggattttgagggattcaatcctgtcaacccctatataaggggttcggttggaagatttttagtttatggtggagctaagaatggcagaaagacatatgctattgaaggctttataagatcagattattttggctgtttagattcaaggaagtccctcacaggctttgtgttcacagcttttggtactgcagttagttggaaagcaagtccttaaaaggttgtggccctatcaactacagaagctgagtatgttgctttaagaaaagctgtaaagaagtctctatagcttgaaggcattgcaagggagttgagactacaagacaaggtgttcacagtacattgtgacagtcagagtgccatccacctatccaagaattttgtgcatcatgaaaggaaagagcatattgacattaaactgctttttgtcagagaattcattggccaggggtctgttatagttaagaaaatatcaacagatcacaaccctgctgatatgatcacaaaagctgttccaagtacaaagttttagcactgtccagatttgatccagttgaagggtgattgaatttgtgtaggtgttctgttgtaatggtttgtttttgaaccaaggtggagaattgttgtttgttggttctcaaacaatcattagctaattagttacttttggaaagctatagataactaactttctgttttgacagttgagttagttattagttaggcaattagaatagttcttctattcccttgtatatatcctcgagtgcagggtaaaagaagctaaagagaaggatctctgctgtagatgatagaaaaaaaagaatttgtaactctgtcttagatgcacgattttaaataaaaataccaattaaataaatgatattgttaaaaattttataatttaaatctactttatatttcaattttctaaaaactttaatctgttgttaagtttttgaactcttaattacaacaatattgcttaaaaaatattacaacaatatattcattttaaattttttaaacgaaaataaatttaataatgtaagaacccacttgatacaaaatgggggacaaatgcttcatgcatctttggttcctgcacgttttcaatcttctgaaaacctacactactagaaaaataggttttaacatcggttattgggaaaactgatgttaacaaaaacgcggtggcaattttgtaaataaacagacttttttaacattggttttgaagatttttcacaaaaccgatgttaaccatgaattgttaacatcggttttcaagatttttaagtataaccgatgttaaccatgaactattaacattggttttcaagattttaagtaaaatcgatgttaaccatgaactgttaacatcggttttccagatttttaagtaaaaccgatgttaaaataagatattaacatcagtttttttatgggaaccgatgtgtggttatcatacccgtcgcgacgattaaacttcaatatcacgcctttatctcttctgaaacgctacgacccttcactctcgcgcctttatctactaaaaactttgacccttcgttctcgtcaccatctcttcgttgtcgacccttcactctcgcgcttgtggttttcaagggtttcctgcactgtcgatgtacaccatctcttctcctactacgtaccttcgcgtcttcttgcttcaaggttccgaccgctgtcaccattgtcgcgcttccagtcaccggtttcattggcattgttggtgtcttgctaaggtcgcgctcccacaaggttagtattcctcttcttcttccatctatagttggtttggaatggaattgaatgatatgaaatatggtctgtgggtcattggcaccaggtgaacaccgatttcatgattttgatatgtttcgataaaagaatatgttaatgtagcttattttatatgtttaggtctctatttaacagtatgttatgtgggttttttgtggatttgagttttctgttgttggttgtggtgaagggatcattgatgggctgtaataatgaaattttgttgttagcagtgtctgctataaagctgatttgttaatttctttttcccacttataaatttgttatttataagtagatatcatatatagaagcatttgatccttgtataaaagttttccttttattataagtttgttatacatagtttgatagaataatttgatccttctatgataaaagttgtgggatttgaggtgcacagcttctgcatggacctgcaatatataattttagctagatacaagcttgattttttttcaaataagttctaccccaagactatttttgccttatcatggtgaagttatagacaagttaagccggaaagtagaataaggcatcatttggattctatgccacatgatagacattttatgaagactaggctggcgattgaagagaacaaagtctccatcattcaaatgacgcgcaacccaaaaccacaactaaaagaactattacaaggcattcacagaaaaccaaaaatattaccattgttttaaaacagtaccttgtagccaagctccaaatggtgatcactacttttctttaagtatctgagatcaagtctttgtccctcatccaatcgatcactaatcgcaaccaatggaacaatgattatcgaatcctcatttcctttaagacacaaaacagctactaacttcggtatcatgcaaagctcactctcaaatttcctcatcagctacaattttagggcctgtttgatatataggcagccacatagtgcacaaacacacgcacacacacacacacacacacattccatgtataggcaaaaatagtcttggggtagaaattatttgaaaaaaaaaatcatttattccgtatatcttttctgatatagaccatttttcttacatacttgttcctttaattctttgcaggaagaacaaccaagtgaggctgcaaccccagattcattgttggagattgtcattgaccatcacctcaggtactgacgaatgcctttcaaatttttttagcttctatatgtaatgcgtacttgtgtaaactgttttatgccattaatgagtatttgtatatacaattaatgttcattatgagtgaaccttagtttctcgtttgagattcattacagtgattctttcagatagtttggattaatcattgtattgattcttgaattgtccatttggacaatttgggaaggcttatattttttaagtatattcatatttatacgttgtcattcttgtcttaaatatgataaaatttcagtacaatgtatttcactttgttctccgggtgcatacttgactgtggtggaactcatgtcaccgctttcatttcgtgtacttggagaccaaagcgaaatgctgccgaaattttgtcatatttaggataaagactcaacgtatagatatgaatatactttaaaaatatgtcttcctgaatgggatagggccacaccttgaatgaaaaaagtgagattttcatgcttggaatacctttgtcatatatttaggataaagactcaacgtatagatatgaatatactttaaaaatatgtcttcctgaatgggatagggccacaccttgaatgaaaaaagtgatgttttcatgcatggaatacctttgtcaatatcacagaattgagttgaacatggatagttggatgaatgcaagtcgcatcacggttgagtacgaagaaggcgttgaaaatttcttgcaatttgcctccaaaagaagtcgaccggatagggatggaaaatatttctgcccctgtatcaattgtttgaatggtagacgataaacactagaagacatatgagaccatcttctgtgcgatgggattaagaagacttatacgacatggatatggcatagtgaattcacagacacgcagacggtctcacagactgaacatattgatgttgacatcagagatcgactagaggatatgattcgtgatttaggacatgagtcttttcagcaagcacatgcccctatgtatgatacgttggagagtcattcgaagaagccattgtatccggggtgcaaaaactcattgacactgttgtttgtggtgttaaatcttgttaatgtcaaggccagatatgggtggagtgacaaaagctttagttcactgcttgaggtacttaaggacatgcttccagaggaaaacaagttaccaagcagttactgtaaggcgaagaagatactttgtccgatgggtatggagtataagaaaattcatgcctgtcctaatgactgcatattgtaccgaaatgaatttgaccaaatgcacaaatgccccacgtgtggggtatcacgatacaaagtgaaggacgatgacggatgtggcagtgatgacagttcaacgaaaggccctcccacgaaggtcttgtggtatcctcctatcattccaaggtttaagcgtctgtttgctaatgaagatgatgcaaaagaccttacatggcatgcagagggaagaaactttgatgggatgttccgacatccggcagattcaattaagtggaaaaagattgatcatttgtatctggtgtttggcaaagaggcaagaaatctaaggcttgcacttgctagtgatggaatgaatctgtacggcagtttaagtactcaacacagtttgtggcctgttttgctagtcatatacaacctgcctccttggttgtgcatgaagcaaaaatacatgatgttgtctatgatgatatcaggcccaaaacagccaggaaatgacatcgatgtttatcttagtcccttgattgaagacttggcatacttgtgggatgagggggttgccgtgtttgatgggtatcgtaaggagacattctagttgtgtgcaatgctattttgtaccattaatgattttcctgcgtactggaatttgagtggatacagtgttaagggctatcgtgcatgccctatctgtgagctagacacgagttacttgcaacttaaacatggaagaaaaacagtttacactcgccgtcgacgttttttgcgaccttatcacccttatcggcgattgaaaaaaacatttaatggaagtcaagagcatgatattgcaccgaatctgttaaccggtgagcaggttcttgagcgtgttgagggcatccatactgtatttggaaagactcaaaagaagcagaaaaggtaatacatgcttatggaagaagaggtccatattgtttgagcttccatactggtctgatctagatgttagacattgtctcgatgttatgcatgtggagaaaaatgtgtgtgacagtgttatcggcacgttgcttaacattcaagggaagcaaaggatggtttacacactcgtcaagatcttgttgagatgggtatacgtgagcagttacatcctaggtccgatggtaaaaaaaatttcttacctccagcatgccacactttgtcaagaaaggagaagataagtttctgtcagtgtctacgtcgagttaaagtgccacaaggatactcttcaaatattaagagccttgtacagatgaaggatttaaaactagttggattaaagtctcacgattgccacgtgttgatgcaacaactgttagccgtggcgattcgagacattttgcctaacaaagtcaggcatgctataagtcgcatgtgctttttcttcaatgccatttgtacaaaagtcgtggaccctgtaaagttagatgacttggaagaaaaggccgcaattatcttgtgtcagttggagatgtactttcctccctcatttttcgacataatggttcacttacttgttcatctagtgagggaaattaaaatatgtggaccaatttatttacagtggatgtacccgatcgagcgatacatgaagatcttgaaagggtatacaaaaaacctacaccgtcctgaagcatccatagttgaaaggtacattgcagaagaagcggttgaattttgttcagagtaccttcagaaagcaaaacctattggtcttcctgagttgtgacatgaggacagagtgggaggaaagggtacacgggggctacatgttataactccttcgttgcaagaattgtatcaagctcatttgtatgtcctgaataacagtaatgaagtgctgccatatattgtttgtcatgaagcactacttaaggaaagtaatccaagaatgacaaagaataggctgttgaaagagcataacaagactttcttgaattggtttaaacatacaatatttagtgatgaatctgcatctgaaacactgaggaagttagcagatggcccaaaaagaaatgtgagaagttgacaagggtacgatatcaacaagtactccttttataccaaacaacaagatgacaagagcaccatgcagaacagtggggttagcctaagagttgagtcacaacactttgctactgtccatgacgacaatccacttttggcatgcttgccttactttggagtcattaatgacatatgggagcttaattatgttagtttctttgtctatgttttcaaatgcatgtgggttgatgtcaacagtggtgtgcgaaccgaggatttaggatttactttgctagatcttaacaagctagcttatcaagatgaacctttcatcatggcagaacaagctaaacaagtcttttatgtacaagatccgtgtgacgaaaggtggtcagtggtactacacgaaaaaaccatcagcattaatgttgacgacgatgacttagtctccgatacaagtgtgactcatttctcaacacaaatacctaacgtgaatagagaagacgaggttgacgatgtttatgcaaatcgtaatgatcatgatgaaggagaattaattaacatcagctaatgtaatttttttgttaactacttttgacttgtacatactatttcatatgtaacataacttttcacttacctttacttatgtgtgttcttgttttttataggatcatgactacaccacccagctcccctcctcgtgggatcagcacctcctcttgagccaacaccttcatcgcctacatcgaagaagacgaggaaagcaacacgactgaggtcactggctactagagctcctggtgctgaaagaccggtggtccatgtggatcctatgacagggaaggctgatggtcctcaggcaaagagattgaggacatatcttggggtcgtggccagagacaaggtggatatcacccttcctaattggaaggaagtgccttcagtgcagaaggacttaatttgggaggacattcaggtattacaatttaaagcattacacaaataaattgttgttcatgtgacttgaaaagtaagttccttttgatgcaggctgaatttgatatacctgaagtgtcagaccaacggacaaagaagaagattctgcagaccgtgggcgagcgctggaggcaattcaaatcggacttgacaaggaaatgggtcctcgcagaaggcaacgacgacgttgccgacgctgtatgtgaaaaatatggcatcagtcacaaatagtggacccaattttgtcagagtaggcgagcagcttcctgggaggttagttgttttatataacccgtcaaattttcaattatgtagtcatacagtctcctatttggtaaccctatctgtctacctgttacagggtgtgagaaagaaggcccaggcaatccagaagcaaaacaccgtgtaacaccccaaaaatttagggaattatagacaattactaagagtaaaatgttaataaaaggcagtagaaaaatttaggacaaaatgacaagaacgcccctgaacaatttcagaaatgacgtttatgtcctaggatgaaaatgataattttgccctgaacaattctggaaatgaccaatgtatccctaggagaaattaccaaaatatccttggacaatttcaagaatgacatttaggtccctgagataaatgaccaaaataccctttaggtcaaaaatgcccagatgagtaaggaaattctggaaaaacctaagaatggaataaaacacttctagataaccaattattgatcaagaaagtaacaaaagacctataagatgagatttctatgaatattaaaaatcattttagaaagaactccagtttaggatattgtaagtgccaaaaaattatacagaaagaacagttatgatctttagagttttcttgtaattctaaaacaaataaactcttttaacaaactaggttagtaattttactaatcagaaacaagatgaaccaatagaaattaagatacaactgtttaggaaaagcttatattactagacatgttacaaagacctaaaattagtctctaaacaattttagaattttactcctaagaaaacaattggaattagattttcctagattttagaaataattttattctatgtaagaatttatattaagtaaaacaaagcataaaatccctaaactatgactactccacggtttaagacctaaattgcacatgtttgcttcaaaaactccatatggtcgtgcacttcatgcaaaggtgaagaaagctttagaaaactcaagaaaaaggacatgtggatggccaaggagcaaaggcaaagacaattggaccatttggaaaacaaaaaaaaatgatggcttaaagaagaaatttttctaaatacatttcctcttgactcctttggacccgtagacagttctaagtattatttcaaaaatcccaacggtcaaaaggtatatatgtaagataggagtattcctttaaaattttaagaagatccaacggttaacaagttcataatgaatatttttgtaacacgggttttgggcagaaaattttaagactaaaccttagctacctcacggtttttaaccaaaatgcagcaaacttaagaaattccacgtgctaaacaagacagccaaggaagagtgtggagttttcttgaatcaagacacttggatggtgcaaaatagctagccaataaggagaaatcacatggaaagtagtcataatgaccttagagatttttttggaaaaatcaagcattaagccaccctataaaaagggtatgtgatcagaaatttggaagctctaagagagattaaaaccgtgcaccatccatcacaaagctggtccatttcattccatctaacactaccattttcctagaacaaaattcaaggcttacatactagaaaatccacgtgaagtactaaaggaattaggagcaaggattcttcaattcaaataaaggaaaactgtccataaagcttaggaaatcaaggtatggggagtttatgttgagcttagtttgaataatgattccttgtttgatttcatgaagcttgtagactaggtgtttgataaaatgtcccaaagagcttgaatgactatttgactaagtaacttgattcaaatttaaataactaagtgttggatgaataacttgaactaaatttaataaagagtaggaattaaccaaaaattaaaggtagtctaattgtcattaagaaaacaatcgtttaaagtcatagttgttaacatatgtgatgttggccgtgaattgtgctatgattccttaagtatctatgtttaatttggtgctagaaattggttggaaatgtgtctaggatgtggaaaatgatattaagtagttttcttttacaagtattctatattgcacaccaggtgtttgatagtttgtcacaaagaataaaagatgtttaagtattgtggatttgaacctttattgttggatatgtagtatacttgcatgattgaatgttttaaaggaataactatgtgatttcacatgtgttgttgagtgtttccataaagcacaccaagtgtttgataaaagggttcaaagaaataaaataagttatgtgatctttcatgtgtaattctatatgtacttttaacatgttgtttggtggtttatgattttgatgttgagaaacaaagtaagaattgtgttatgatgatgaaatattgaaattcttgtattgttaaaaatgttgtgattatttatggattccaaaggttgtggtgaatcatggttgtatactgagattatgatgtaaagttttatgggatcatggacataagctttatgtgtggttctaaaaatatatgccatgagttgcaatgatatttagagactggataaaatgaaccattcatgcatttcatatgcatatgcctggcgggggttaatccgtggagttgtttgtcatatagctgaaccgagtccatgcgttcagaggtgtgaactggagggtagtgtgtttcagggaggaccacaccatcatgattatcacataggtggaggtgacattcctacgtgcccctgccctacccaactgaatggataggtctgccaatggaatggggctatctgactgtggccactgatgatgattttacgataaactgagatctctgtcatgcatcatataaaaaagacgagcatgcatcttatacatcgcacaatgggtatatgtatgatgatctgtacactgtataagttgtatggattttatctatctgtgtttatatggttcaaactatgtttgtcataaacttacccgagttgtgtctgtggtttgacacctgtgatgaccccaattcatttgggcgagcagaagaacaggaaagcatgagctgtagatgaagattgttgaagaagttttgatgaactgttgctgtaatttgtaatttcatatggcatgtaatttgtaatagacagtctgtgtattattttggataactatctttggactgtaccatggactgtattcttattatatgaactgtggtgaggaaaatcgtttacgctattcacgaaacataaaattggcaaggcaaaagaattttcgtgaaaaatttacaactaagatcattttaatacaaagtggacacgagttgtaaataaaatcaatcaagtacgagagagttaagagaggcgttacacaccacccctcacgtattgtcacgcgggggttacgagttgctcgagaagagattgatggaggcaaaacaaaagaagcagctggagggagcaactcgcgatgatagcacggacaccatcattcatcctccgtcccctgtgtgacgacacgtgaagtggaagctggctcgcacaaagaaaagcgacgacatgacttcggaggcggcacgccagattgctgagaggattgtaagtaaaacaacaatctcatacacatttaattaatttttgtatcacaagtaacaaaacaaatggtctacttattttgattgcaggattccctggaagagcaatccacccagggttcttttgtcgccagtggtcgtcaggatgtcctggctgctgccattggacgaccggggcatcctggccgtgttcgtggtgctggagctggtgtgaccatcacccagtacttcggaccggctccatcatcctctcgcaagtcgaagtcttcatccatggcgcctgaagacttggatcgcctgaaagacaacatcagggtcgagctgcagcaatctatcactgatcgacttacatagtcgatcattgaaagagttacacaacaggtgatgatgagcttcagccagctgcagtcccacatccagtctcaggcttccattcagcctccggaggttcagtcatgtcctcttggtgcccgtgtcagcaccaagggaagttgtgtcgatccctcgggcaatgagccagacacgggtgcatctgacaggcgtgggttgtgtgtggatggcaatcctccccgccttgttgcccttggcagagttcatgagggattgacaactgtgcacagtgtccctcttgccgctgatcaggtaaaggtgagtgttgaggaggtacgcgatgcagaggctcccgtccctgttcccactgacgaggttcagttagtggggcaggcactcaacactttccttgcttggccgacacatcttgtacacacaattttgactcaggtttttgatttttcccttatgtcttctaatttacgaatgatttgtcacatatcaagttaaccttatcgctcacccttgactgttaactgtgtaggataaagaagaacccacccaagggatcggcgaaacctgtacataagtcggaacatgtttctgatcccttgtaccatttagcattgaccatccccgatcttttcctcaaacccttccaggtgccatgggacccgcaaatgttcggggtgcataatgacaacttcccgttgtacatcaagcatgaggatatttcagagatcatccatggtggtcaatgtctcaacatctccattatacaattgtggatgttgtaagtctcttacaattgactagcattacttggtgagtagttttatattctaccataacttactttattttcattgcacaataggcatatgaatcatttaagtctgcaatcggatcatcccgatgtgtatggattcctcgagccacagtccatacagagatctggccaatctcaatttcaaatcgaggactatatgaaaaaatggatgcagacttcacagaaaaagtctaccttgcaccgtatttgaatgggtaagcataaatgagaatcacaatttaattaatgtatgcagtataataaccttgtttttgacaatgcagttcacattggcaactggtagttatatgtccgaaggccaatgtagttgcctggttctgttcgttgcatacaggcctgataactaccttaaaggaattattaacaggtaggttctaatttctaacacatttacgttatttctattgttgaaaggtaacttgtagactatgcatacttgtttttcttaaacagtgctttggagggagtggatgactctccagcaaataaatcaaatgctacaactaaatggattgcgcttaaagtaagtcttttcataaatcatgatttaagtattgaattaatttttattaatatttacggtaattaccatttaactttgaccgtgtttttcaatttagtgtaataagcaaacaggaagcactgagtgtggctattatgtcatgcattggatgcacacaatagttcaaggaggcttcacagatagctgggacatggtaattagttgtttaattcaaaacaaattatttttgtttacttgtttttgtttcgtacttattacatgttttcttatgtcatgcagtttttcactgatgaaagaccattggaagccaacacgttgaaggcgataagactccaatgggggaaattttttcttcaaattagagaagatgtattagtagattaggtggtttattggattttcaaaacaattgtatatattaatgcttagcatattcttttatgtacattgacaatatttacattggatttgttattggaatattattaaattatgaattggctggatctggatttttaaattttcacgttgaagaactgctaaaattaaaaaaacaaataaaatatttaaaaaaaatataaaaaaacaacatcggttgcaacaaaaaccgatgttaacatataaatcaacattggttttcttacaaaaccgatgttgattatggataagaacatcgtttttccaatgaaaaccgatgttgttacattaaaacaacatcggttttctttccaaaactaatgttgtcaaatcacaacaacatcggttttcattggaaaaccaatgttcttatccataatcaacatcggttttggaaagaaaaccaatgttgttgtcctttttaacatcgtttctgcatggaacctgatgttgtcgcaccatcttttacgcctttcaacgttttcatttatcacatgtccacattggttattcatggcaaaccgatgttctttacttttgttaacatcggttttgagaaccgatgttaacttcaatactttcaacgtcgcctggttcaacatcgggtcagaaccgatgttaaatgtctcaaataaccgatgtagaaagttggtttctagtggtgctaattcgaaatctaattttatattatgggttaactttttttaaaatataattcaaaatgtaaattttgacattatggattggctaattacattcaacagtgttggaagcaattgccaagatgtggcaatttggtcaaaatatacaagataaaaattcagtatatcaaaacccaacccccccccccctaaaggaataattaatattcaaaatcttcatatttagaggaattatgcatactactgtgataagaaattgatacctcattttgctgtaaaatgttaactaaaaaaaggctatttaaatgatgtaaaaacctaaagaaatcttagcatagtgatgaaaaatcttaggaaatcttagaaaaaatgaagataaaatcaaagaagaaatgaaattgatgcgacccaccatttcaattttgacccttgtatttcctttttgtttttattttcaattgataaataataataataaaaacattaaaagaaataagtggaaatcatcttagcataattaagattacaaggaaatgaaggtatggagatcagtcaaacattgcttaacattcacaaagatcaattccatacaacaccttttttcaagagactaagttaaaatatatatatatatatatatatatatatatatttaaaatactaaaatcaaaaatacccattttttccctgtcaaattactttaatttaaaccttttattctttttatactttctttcatctctatcaaatcattttactttacacttcctttcattcattcattttcatccctttttaccaaagacaccctaagtttgtttataaagttacgattcagttgaataaatatggtttggacccaattttgtttattataatgtattatacattataatacattgaaaaaaaaatttatcttaaaacgtaactgtcttgactcatctatgataatctctatatggtttctaaggcatatcaagctttaagttatatgtccatatttaattattggcattaaggatcatttgtaaagaatccttacaaaattgaacgaattggatcaataaggttcaagtttcatgatggggctgagagggttctcacagatgtgatatatgtacttgatctcaagagaaatctagtctctcttgacgaatttgacaagaaagggtatgtgttcaaaagataaccgaggatcctaaattttttgaaagattctgtgactgtcatgagaggaatcatgaagaatgacctatattctgttgatggtgaagttgtgactggctcagctgctactgcatctggtaaggttctgataggcactggattagcagaaaaggaaagaaagagagtagaaatgaacgagaattattattattgaatgaatggaaaataatccacagcttctacacttgtgattcgaggtcacaatcctccaaatgggtaactaaccccctttacagttattcccctgtatttatagcttctttccctcctaatacaattacaactaaagcctatctgctattttgcttattacacctcctaccatatgtttgtccccacctattgggcctatcaataccccccccccttcaagatggaccttgtcttcaaggtctaggtgaggaaacaccttcttcaaaccagtagctaattcccagctgttttcatgttgcagtaaccccttccatttgaccaatatctccttgttgccatatgttgatatcctgtactgcttaacactctctggttgtaactgcaactcccagttgtcattcaaaacagcaggtaaaggttaaggagaacatgtatctttaatagatttttttaacaaagatacatgaaaaactggatgaattctgcttccctctggcagttccagtttataagcaacctccccaatcctttggatgaccttataaggtgcataaaatctgggacttagcttttcattcactttttagccaaagatctcattctgtaaggttgtatcttcaaaaatacccaatctccttcctgaaaactgatttcccttctatgctgatctgcatatttcttcatttgatcctgagattttaacaaattactcctcaaatattgtaataactcatttcttccctccatcagctgattgacctcttccaacttagaaggaatatcagccccttttattaacaaaggtggtttctgtccatataaggcctcaaaaggtgacatctttgctgaaatattaaagttggtatgaaaccaaaatttagcctaacataaatgattcggccactgctttggtctgctgccagtcaaacacctcaaataggcttctaaacacctattagcaacctctgtttgcccatctgtttgtgggtgatatgctatgctcattttcagtttagtaccaaccctcctaaataactccctccaaaataaactcatgaacacctgatctctgtctaaaactatggatgaaggaaatccatgcagcttaaccacttcagtaatgaaaatatcagccacttccttagctgtataaggatgactaagagcaaaaaaatgagcatacttagtcaatctatcaattaccactagaatagtgtctttaccttgagttttaggtaaccctccaataaaatccatagctatatcagaccatatctttacaggtactggtaatggttgcagcaatcctgctggtgacaaattactgtattccaatatcatgtgttatcattgcaagaaagagggtcacactaggaaggtccgtcctgaaaggcaagtaaatggtggcaacaaggataaaggaaaggattctgggaatgcagccaatgctcaagataagggttacgaatcagcagaagtttttgtggtgtccaaagagaatccagaatctgagtggataatggattcagggtgttcatggcatatggcaccaaatagatcatggtttgagaagttctctaatcaagctggtggtctggtccttttaggagacaacaagccttgccttacaaaattgaacgaattggatcaataaggttcaagtttcatgatggggctgagagggttctcacagatgtcatatatgtacttgatctcaagagaaatctaatctctcttggtgaatttgacaagaaagggtatgtgttcaaaagataagcggggatcctaaattttttaaaagattctgtgactgtcatgagaggaatcaagaagaatgacctatgttctgttgatggtgaagttgttactggctcagctgctactgcatctggtaaggttctgtcaaaaactaaactttggcaggtggttggggcgtgtaagtgagaaagggcagattgaacttgaaaaacaagagctgttatgtggagacaaagtggagaagcttaagttctgtgaacattgtgtgtatggcaaatcctgttgagccgagttcagcactggacagcaaagaacaaaagggactcttggctatgttcatgttgatctttggggaccaactaaaccccttcccattcttgtgccagatacttcgtgagtattattcagggaaggtttggatattcattcagaagaccaaagatgaagtaattgaaaatttcaaaagcaggaagacattggttgagaagcaaactggtagaaagattcaaaaatttcctactgacaatggacttgagttttgttcagaacctttcaacaatttctgtaaaaaaaacatggaattgcaaggcacagaatagttgctgggatcccccaacaaaatggcttggaagaaaggttcaacataaccattttggagagggaaaggtgaatgttgctaagtgcaggtttgcccaaggtgttttgggaagaaacagccatgactgttgtatatctcatcaacagatacccttcaacagccttagattttaaaactcctgaacagatttggtcaagtcacacaccaagcctaaaacacttgaaggtgtttggttgtgttgcctatgctcacattaggcaagacaaattggagcctagagctgttaaatgcattttcataggctatccgaagggaattgaaggttacagacagtggtgcatgtttagaggttggatacaaaagatgttttgtgagtcgtgatgtcactttcaatgaaggtgaggtggcataaatggccaagtttagtaatgatcaaagcagggctgatcaacatgaagatactaaccaacagtcaaacttgaggtggagcctgagataaaaacaactgaagttcaaggaactgacacacctcctggtgaagaggattctgaagacgagcacaaggaaggaagcagctacctgctagctcaaaatagaacccgaagggaaatcaagccaccggagaggtatggttatgcagatttgattgcttttgccttggtaactgctactgaacttctagatgaagatcctaaggatctagaagcagtcctagtcatcaaggaaaagaaaaattggttgagtgccatgaaggaagacattaagtctctccatgacaatcatacatgggagttgatcaacaaacctcccggttctaaagaaaaattttgaggcttggtgctcttgtgggcctggggtttattatttgtagtttgtacttgtaccataactggctacggtgcttaaggtttctaagcttttatatttccttgtaatctgagtgcattgtaacgagtgtgtgaggagaatataaaggaaagctggacgtagcccacattggtgaaccagggtaaacactgtgtattattttttcttccctttctctctttctatttttctcaattgttgtgtgattgctcggtaccaacggaggattctctctaaaggagggagttgatttcaatgaagttttctcacatgtagtgaaatacgggtccataagaactctgttagctatggtggcagaattagaccttgagctagagcaaatggatgtaaaaaacaacttttctctatgggaagcttgataaggtgatactcgcaaccagaacgttttgtagaaaaaaagggaaagaggattatgtttgcaaattgaagtcataagacaaatcaagactctcaattgttttgatttggtgcaaataaatattagttttaaaagttaaatctaaaaacgcatacaaacagagagtgttgagtctacatctgatggatcaaatgatactagacatatgcttaagtctttagcatttaagatcaagttaatggatgtatgcttgatcctctgtgtaggcccaaccctgaacagtgtttagaggtaaactaacactaggtccataaatttgaggggcccaaaattttattttgctataaaataaaaaaaaacattttaatatggcttaccaattctcacactaatcaatcaaaaaaaaaaaaagttcaggcccactcaccctttcagcttcttctccacttctcaatatagtgcaccccatgacaattcccaaattccaacctcaaatttgaaggttacaaacaattgaacattgaatttccaaaacagtattcgatagcctacaccaatttctaactttgtggaaatggtaatagtttttttcttttatgataaaaggtatagaaagaagggaactatagaatggaaaacccatagaaaaaaaaagaaagagtagtacactgaatattaatatcatattgattaaaagtcgtgactatcattgccaactacatctgaattgtgatttcctttctgaacttaagccaacaagtcaaggagggaaggaccaaatcgcaaagaaggtcgagaatgacttaacggctagtgtcacgcgtgacgattacagattacctagtggattattaaactccaaggcttgaaattcaaagtttattttcgattcattcgctctataatgtcattgctatatatatatatatattaatttgacttgaataattggtgttggattgatcaaatgatgcaaagtgttgttttacttgctacttttcatgatttggtactgttgttgcagcttaatatttaaagtgaaataaagcttgttttgccttaattaagaaattatattatatctgttattcaataataatacaatgtttaatgagattaagtatctattttatttttcaaataatatttgttttaaaatagttatatataatgggcctttatttattattttgcattgggcccataaaaatgtcagggccaaccctgtctctatgcaaggaatgtttgaacgttcatcataagatctatcaaagagcgataaagagagaaaaaagttaaagattacaactatctcttacatcaaaaggtgtgtcatatcagacaacagtgtacttcatagtggaaaagtttacgtgctttaggacgtcgataaggagtcctctacaaaggaagacaagcaaaatgtttttatcaatcttaagtggctatttggtgacaatcattaattgttgtatttaatggtccaataaatatgtaattattaatattatctaatatgtaattaattatttttgtttaattttaattttaatttgaaattgtattgcacaataatttttatttgtttacttatttaataatttatgaactctaaataatcttataattattagattttatttatttccttatttaataatatattgattatgttatttaacaactaaaatactgattaattttttggagttttttagttattattttcagattttatattttctttgactactaatacaattaaattcattattagttttgattaataaaccattaattaacgaatattttcaaaatatttatttaataatcattatattcctttacagttataaatgatttctctaccatttattattgtcttattgataaaatcttaatgaaaataaattattttttcttattttttacataaaatacatctttatatatttatttaatatattcttaatttagtatatctcaaggtgaatgttgctaagtgcaggtttgtccaaggtgttttgggaagaaacagccatgactgttgtatatctcatcaacagatgcccttcaacagccttagattttaaaactcctgaacagatttggtcaagtcacacaccaagcctaaaacacttgaaggtgtttggttgtgttgcctatgctcacattaggcaagacaaattggagcctagagctgttaaatgcattttcataggctatccgaagggaattgaaggttacagacagtggtgcatgtttagaggttggatacaaaagatgttttgtgagtcgtgatgtcactttcaatgaaggtgaggtggcataaatggccaagtttagtaatgatcaaagcagggctgatcaacatgaagatactaaccaacagtcaaacttgaggtggagcctgagataaaaacaactgaagttcaaggaactgacacacctcctggtgaagaggattctgaagacgagcacaaggaaggaagcagctacctgctagctcaaaatagaacccgaagggaaatcaagccaccagagaggtatggttatgcagatttgattgcttttgccttggtaactgctactgaacttctagatgaagatcctaaggatctagaagcagtcctagtcagcaaggaaaagaaaaattggttgagtgccctgaatgaagacattacgtctctccatgacaatcatacatgggagttgatcaacaaacctcctggttctaaaaaaaaattttgaggtctggtaccgttgtgggcctgggatttattatttgtagtttttacttggacccataaatagcttaccaattaaaaaaaataaaaataaaaaacattttaatatggcttaccaattctcacactaatcaataaaaaaaaaaaaaagttcaggcccactcaccctttcagcttctccacttctcaatatagtgcatcccatgacaattctcaaattccaacttcaaatttaaaggttacaagcaattgaacattgaatttccaaaacattattcgatagcctacaccaatttctaactttgtggaaatggtaatatttttttttatgataaaaggtatagaaagaagggaactatagaatggaaaacccatataaaaaaaaagagtagtacactgaatattaatatcatattgattataagtcgtgactatcattgccaactaaatctggattgtgatttcctttctgaacttcagccaacaagtcaaggagggaaggaccaaatcgcaaagaaggttgagaacgacttcgctgctagtgtcacgcgtgacgattacagattacctagtggatcattaaactccaaggcttgaaattcaaaggttatcttctattcattcgctctataatgtcattcctatatatgtgtatatatatatatacatatatatatatatatatattaatttgacttgaataattggtgttggattgatcaaatgacgcaaagtgttgatttacttgcagcttaatatttaaagtgaaataaagcttgttttgccttaattaagaaattatattatatctatttgattcaataataatacaatttttaatgagattaagtatctattttgtttttcaaataatatttgttttaaaatagttatatataatgggcttttatttattatattgcattgggcccataaaaatgttagggcctaccctatctctatgcaaggaatgtttgaacgttcatcataagatctatcaaagagcgataaagaaagaaaaaagtcaaagattacaactatctcttacatcaaaaggtgtgtcatatcagataacagtgtaatgttttaggacgttgataaggagtcctcaacaaaggaagactagcaaaatgtttttatcaatcttaagtggctatttggtgacaagcattaattgttgtatttaatggtccaatgaatatgtaattattaatattatctaatatgtaattaattatttttgtttaattttaattttaatttgaaattgtattgcacaataatttttatttgtttacttatttaataatttatgaactctaaataatcttataattattagattttatttatttccttatttaataatatattgattatgttatttaacaactaaaatacttattcattttttgaatttttttagttattattttctgatttttatattttctttgactactaatacaattaaattcattatcagttttcattaataaaccattaattaaagaatatttttaaaatatttatttaataatcactatattcctttacagttataaatgatttgtctaccatttattattgtcttattgataaaatcttcatgaaaataaattatttttcttattttttacataaaatacatctttatatatttatttaatatattcttaatttagtaaatatatttatttaattattttattaacagtgtataattttttaactaaataattcttacttatattgaattttatttgattataaacttaatgttttaatattttgttaacggtcactaaaattttaatggataaatatttaatattatgtcaatgatatacacaaagaatattggttaaaattttaatgaatcaaagacttctcaatagtaagtgtttgttttttctattacgatggaaaataaaaaataaaaaaaaaatcaccaagtatattagatagaatatatgaaagcaaatttgtattcatacaaaaagctttttttttttcttttgttttgttctttaaaagagagaaacctgacgtatgttgatttagtaaatcatatgatggaacaaaattattttaaattgattaaaaaatgacacacgacataatattttgagataactaattatgtgctttaaaggatcttttatttatatgttggttaacatgtaagatatgcaacacacattaccttgcctttggaaaatattataaacagaaaacatgaaaaaaaatgatacgatgaaaaggacgtgaaatcgttataaaagagattttgtttgacttaatgtctcaactgacaccaacttgttataactataaatgactctatacaattgctaattccttatgtagtttgatttaagtcactgtcaattcttattcttaaatattctattcaaatcattatctgtatattctattaacatgctacaacaacaaatggaaacaaacttttttcacatgtgtatttaatctacatttagttatgccagttatgtcgctacaaaactttctattataaaagcaacaaaactccatatatgtacaccaatttacttaaagattgcttcgactttcaacaaaaatcaaaaacgacatcatgttgaatccttcattttcttctcatgtggtatgcaatatttgtatctttttttaatcacatgtttgaattatatgtaattaagcttaccttaaaagaataacatcacaaacattagtggcagacccaggaattttgtttatgtctgcacatttagtggcggggattcggggacagcgcccccgaaaaaaaattagttaaaaaaatttaaatcaacaatcatttagtctttcaagatgggttggaaaacacaattgcctgaatgatcatattacacagggtcagaaacagcttgatgttgatgttattgtttcacttgtagtaggtatgattttattaaatttgctcaatatgaagaatattatttttaaaggtatgttgttagtgtcaatgttaccatttcattgttaggaatggttaaggaggaaccgtctgtgtcaattgcattggttcaggagaggatcaccaatacgtatggatttaaagtttcatatggaaagacctggtatgcgaaacagaaagcaatggcaatgatttatggggattgggaagaatcttatgcattttttccaaggcagtgcaactacatgcttcatttttcacaggttctttttatgatattcaaacaaatgcttattttgtggcaaattgactggtacggacaaagtgtgtgtttcatcgcatgttttggacttttaggcagtgttgcgaggcttttaaattttgcaaacccatcattcaaattgatgggactcatttatatggcaagtataaaggaaaattgttgattgccacgagtcaagatggaaataatgagtgtctgccactggcatttgccattgttgagggggagacgttggtagcctgggaatacttccttgctaacattcgcctccacgttacccaaatgcaaaatatatgtcacatttcagatcagcacttgagcataacatctgctgtggagaatcatgccagttggcaaccaccttttgcgcatcacgtgtttagccttcgtcatattgccagtaattttaatcaaaggttcaagagtgcaagattaaagaagaccctcatgacgttaggtatgttaacaaatatgttgaatacattaagctaagacaaatttgtaaacggaatagtgttaatgttattattattctgcaggttatactcccaatatggttgattttgacaccgtgtttgcacggtttcgtgataccagtgctgaggttgtagaatggattaatggcatccctaaggaaaagtggacacgtgcatatgatgtagagggtaaaagatatggccatatgacaacaaacttttctgtatcagtgaatagggtgttcaagggagcaaggaacatgcctatcaccgctcttgtgaaggacgcatacacccgattggttcattattttgtatgcagaggtcaagcggctatttcacagcttgaccattcacaatggcattgcaaaaatgtggttgatgctatgaggcataatcatacccttgctataggccaccatataggcacgtataatattgagcaaacattatttcaggtggaggagggctgggataggtcatattcagtcagccttgcagagcattcgtgttagtgtggcaagtttaaggccttcaaatacccatgtagtcacgccacaactgctgctttacatgttcgccaaaatccttatcagtttgtggatgatgtcttcctcgtaagcaacttggttcaggcttattcattgccatggcaaccaatcggtaatgaacatgttattccaccgagtgaaggtccagttgtcatacctgacagggacatgttgtgtgcaaagggacgtccaaggtccaccagaatacgtaacgagatgaatgaagtggaaacaattccaagacacgtcaaatgcggaatttgcaagcaggttggacataatcagcgaaattgtcctactcgtggtggtactttatgaatttttaattaatgtgatattaatgcatttgatttataaaaatgttgtctaacccctgtatttggttggaagaggtgatattactcatcatgttttgcatgtgattagacataggatgatcacattttcaaaatgtataatcctaaatcgtaaaccatgcatcaaccctaaaccaatcacattaatcaccaaatcaatacaattttgttaggcgggtccatgcacctcacgatgcttataattttcctatctttctgaagaataatgaacatgataatgtaagcaataccagttatccgaaattatccctataaagatagtgttaaaaaaaattgtactgtaaacattcgatattttggggttggcttatttacttgaactaatcgatcctattatgcctatgcatctccctctccctcaccagtcaccaattccacaccatatggccgcctttgatttcatattttggaaaacacaatttcttaattatttctagcagagaagtctctacctttcacacaattgtcacaataatggaatttcaataaacccttttaccttccaaatatatggtatagggaaaaaacaagttatttaaatttaggtttgcttagaaacaaatgtaatataattcaaattgaaatccattttaatgtgctgatcaaaataataacgtgagtgtaatgctactttaagtatagttattaattaggttttaatagaataaccagttatccgaaataataacgtgaggataaaaatgacgtactaagtagagagagtggaatacaaaagactgaagaggaagaaggacgtgattgtctcgcctgagtgacagtgagtggactgagtggagtgaatgatgaaaacaagcccaaataggacacgactgaacatgcctaacaaatagagcgtgactgaacacgcccaaatagggtgtgactgaacacgccgaaatagggcatgactagacacgcctaaatttgggcatcgttcacccctatataaggcatacactcccactcccacacaacatgcttccacaatcgaaattcaatctgaatactatggcattcttacgagaaacaagcagtcagaccattggtaactccaaattagcattcatttttctaaatggatcaatgaaacacaatgaaaaaggcatttcttatcaatgccctactccaataccaatgcgagttcctaatgagtgttttttccagacactcaagagtaggatgcacggcaccattctgctagccagtgaccactttattgatgaaatctactaccgacagccatccctacatgcaggtcaggaattttttttcattctttgcaactcacaaataatgatgatgtttgcacaatgttaatgtgtaatgaccaaatgtcaagtgctggccctatagaaatattatgacccatcaacagaacacccgatggtatactcaacctacttggatccaccatcgtccctacacatgatgcaatgctatattacaacggcaagtggaacatagcacgacaaggcgattttgtgggttattccttcattggaacaaacccaataaggtttgaaattccttcaagatgcaacattgaaacactaaaggatgtcataaagaaagttgcgcctgttggtgttcccccttatggaattcacaactcacaactggtaaggaaattgtttttccgacagccaacccatgccaaatattcagactacacaatcgaatatcacataatatagttgactagcgatgaagacgtgtttaagttgtcagcaaaatccaactactggaaacgttattgtccaatagagattttagctgttttcaacaaaccagttacccaaatggaatgagacatggtcataatgttggctggaattattcattgtgttaagtagtgtttacaaagtttggttatgttcaattgtcattgtcatttaaaatgtcagttacgttatcttcttttatcaattactattgttggtcgtttggattgttgcctctgttatgaattactgtttttcacggtgttactgattgttaatatgtcgactgattaaaataattgttacaaagaaaagttcaaaacaaatgtaacttaagaaatataatgtattacaaactactgtaacaccccgtaggcctccagtgcgttaacattaataatatcagttaagtgcttaatcattatttaaaacttggcggaagcccagaatcgcttttcttgattcattatgtatggaataaaagcacctcacagcaaacatacacataaaatagatgtttcacacccctgctgatccaatttcttatacataatcataggtagataaacatatacatcaggaataaactcaggagaaaagtctcatatcatagcatcaatagttctgtacatatatatatacatcagtgttttcaccacatcgtggtgatacaaaagaataactgccctcaccgagggtatacagaactatacataactcaggtgtacacacaccagcccttatcaagggtacaaacatatcatcacaaaactgagccttcaagctccctctgctgccaccggccaagcagacatgtctccactagggccttctgccctgagactcctctcctcttccagaagagtcacctgtaaaaataaatccccaaccggggtgagatacacatctcagtaagctcagggtccttggaggaatctcccccaccctggccactttccatgaaacacacatcaggcaatcacaagcaaatggcccactggcccgaccctctagccctcataacaatataagcaagtcatccatacatggcggagctacctcaacgcctggcggagctacctcaacgcctatatcagtgtgagaccggaaactcacacccgtgctatcccattgggtgctaccccttcgcatggatgcacatatatggtacctccgagaatagaaggagctacctcaacttctattcttggtctgtaggaatcaccgattccctgggatatcatcgaccaagagccaaccaaactaggaggaaactcatctcctaggaaggtccatatctatctactggccaatagatctatcacaatcatatcacataacaagcacagatctacacacatatcattatgaggatgcaacaaccaaatgcatgcatcatgaatatgaccaccactcccccggagtgtgatgtggcaaaccatgtgggaaatcatcccccagggacacagaacttacctggcaaagcctcgctctgcagttctttccctactctgtggcacccgccaccgacaccctcagtgtcaagccctaatcaaggcatatataggttcatatcaaaaccaaaccaacatgcattcaatcacagaacataacatatcagaattcccctatcctagggttcaatcaagtcaagccctcaccaggcttctcacagaccatacaaggtctactaaggtttaataccaagcatctgagtcatcctagactcaatgcaaacacatgtctgagcacaagctcacatcagtctcataatccaattatcacaggaacggtctaaacctcagccaaggcactgttcactagcctctcaggctcaaaccaaacataatcaaggctctagcatgtcataaactcaattagtgactcatcacacagccacacatgcaagccacagagccaagattcaaaattcactgaatcaaaatctgaaagctaatccttcatcactaaagcgttctaaacaagtttctctacaggaccctgggctaattctagccccagctcatatgggtcattattcatagaaaaccccaaatcagaaatcaaccggagaaactcgagtttcttacctcagtggtgaccagaaaggctagaggatagctttccttagctctattgtccgttttgcgccttgggtccttgccaatactcaagtttctgagcttccttgagagttggattctcactcaaagaggggtttccaagaggattgatgtaggattaaagctctcaatgtgtttctctcaagattaaaggtcatggggaggtgtctaggtcaagaaaataggtcctaggaagcttgagcaagcatcaatggaggtttgggcgttggggaagaagaaggagttgattttccttcaaaattagcgttttggcctttatatactaggcctgcccgaggtctggcgcggatcgcgccacctctggcgctaatcgcgccaccatggcggtgggcctggtgttgggagcgccactcccgcgcccccagcgccaacttccagaacctgtggcccccccaacgccaccctggcaccaccagcgccatcctcccttgaccttgtggcgtcgtccgcgccacagctggtgctaaccgcgttgactgggaaacatggcgcccctcatgccaattctcacgccccaagcgtgaacttccagagaatctggcgctcccagcgccaacctggcgctcctggggccacattctagagcccgtggcgctcctcgcatggctctggcgctctaggcgtggaattccaatgggtctggcgccatcagcgccatccctggcactacccgcgccacacccttggcagggtttttctgctgaggatcccggcgctaaccgcgccacactgagggtccttacaactacaatgaaaaaacacaaatggtgaaaaaaactaagactggtggccactgataatgactctggtggccacttatggggaagggtctggctgagaagggtcttgttgagaagggtgtggctgagaaggacctgccccataagggtctatatatggaggtggacatggagtggcctgctctgaatatgagggctggggatgctcatcagctgcggtggaatacggtacatctgatgaccaaccaccacaacctacaacagaataatcaagctgggagagcatctcgtcaatgtcagcaccagtccactcagtaggacctacgtcactacttgcctcaacatccgttgatgccatcgccattgtagtagccacatatacaggctgggtctgggagtcagccagtggaggcatatgactctgtgaactgcatcccccgtaccccatgtctccctgctgactagactcgtaatacaggggttggctgccatatgtcaatgctacatatggaggcctaaaataacccgaagtacgaggcctgatagccacaatgggctcagaaacatgatgcatctgtttccattgacgctctagcctgtgcgcctcctgtcttcgacaaccaacgacaacagacacttgtggctcctcctgaagctgggtttctggtgcatgtggccctgcctcctctagccgacaactctctctaaagatcgacattatgcgaccgacttcctgttgctcccactcgcgactataacccggtcactgatcatgactaagcgcgaagtacagcatctccagcccatcaatctaaaaattaaaatatataaacattagtgtgaatcatgtgttctatcataataaagataaatagacaaattataatgttagcaaaacttacaccacgtctagtcttggcagccatcttcgagatgtaccgcttcccattttccttgtaccaaaccatgtactcatggtttggtgacatgtagccctgaaccagagggggaaggtcgatgtgttggtctcgaacctcctagtatctaataaacggtctcagtttacaggcccaattatcttctcatttaccacacaaggaaaggtcatgcacacccttcaatttcctgggattacgtgggattggctgatccctcccaaattggcacatgcagctgtccggctgcgaatactccatggtgtggaagcatataacaggagaagttgcaatccacaacagtcgctgctgctcagatgcaccaagaaagtcgtaatcttgatatggttgtcaaaccacctgcataaaccaaataaacacacaattatgtaatgacatggaccacaaatgcacagttatgaacacttacaaataactaaacgtacctcatcccgactgagggattccaatctcatcctataccagagcagctcgtgtgctcgaaactggcctaaagcattaaaccttatttcaaaataactggcattagaatactataagactacattacaaaaattgttaaaaaaaaccaaatatactaaaacatactggttccgtaatgccactcagggtgagtaggaagcggaatcgctggagcaatgggtgggaatctcaaccacgcccacacctgaagcaacatgtgacacccaccaatgtcatttctgtgtggatctgtccacttgcacatttgtctaaacaaatgtgaaaggacagcaaagccccagctatatcctccaatctcctcgaagtccccagcaagcaataggacctaacgcgccgcgaccatgctccccccgaatctgtcgctcagcagccatgatccaagaagtcgcgcaatgtgtgcctttgtaaagtgaatcacaatgatcaaatcaggttgaacctcaccccagtgcgtaaaatgtctagctaagaaagacaggtgcaaatatccacctttaatctcggtgtctggctgaggttcatgaccaaaaacctcttgaatgacggtctcccattcagccacggtgactcctattacaacattgcccttggtgggcaaacctaaaataccagctatgtcttcgtgatggtcatttctccctgcagcatgtggaaggtatgggtctctggtctccatcgctcaaccagagcactaataaacgcagcatcgatcttaaaaaaaattaacaaatcaattcatatgcattcatctaaaataaaattgtttactccactcatttcctgcttgcatacctgaatatgtcgcatgcatgcgacatgtagaaagccatcatttcctaacagatcaccaacaatgtttggtatgtcatcgtgttgtggcccccccgtcactttaccgcgtcaagtcttcagtaggcgagctgtgtcctcattccacatagcttgtgaaacgtgggtccgctgagtccgcctacgcaaaacaccccacttatatggggtagggataacatgtgtcagtcatctaacgagtatttcaatataaataaatgaaaattaaaattaaaaaaaataactttagttgacaacacattacaaataattatcatatcaaattaattaaacctaatgtacataactatcaatcgtaaaccttaaaccataaacactcgaacataaaccctgaaactaacaccgtaaacacaaaacccttaaccaaatcctctaacaccataaagcaaacaccctaaacccttaaccaaatcctcatatctaatgaacaccgctgagacttggccttacgtgccactcaacatagtgctgtcaaccataaaccacacaccctaacccttaaccctaaacccatattccgaacagactaaacactaaacaattcacctaaccaacatcaacactaaaccctaaacactaaacaccctaaccataaacactaaacaccttcacccctaataattcacacccaaaccctaaacattaaacaccttaaccctaaacactacacatcgtaacccctaaaccaaacaccctaaaccttaacccctaaaccaaacaccctaaacacaaaacaatgaaccttacaacaaacactcacaacacaaaaccctaaaaaggaaaaaaaaagaaggcaacactactacaaaagcgttattcaaagatgattctacaccctatacaaatactgttcttcaatcgtctttgtatccaacatcgacaaaagtaagacatttgaagaatcaaatttatcggcttttccttgtatggtaaaaagtaaaaggcacaaatgaaatgaagtaaaaaaattgactgactggcaatatcacacccaactgggaggactgctaagttcagatattgaaatgtggttcaattataaagcattcttattgaaaacaattatggtttcttctccaagttctagtttgtcagtgtaaacaagggatctataagctttgtggaagaaaggctttggttttcattcttaagatgaatttagttataatgttgtttctggtgtgagctagcaaatgtaaatgaaaatgaaaaaagggtgtgcttactcgaagtgaattatcaaagtggtctcttttgatcatatttccaagcatgacaaacattgtgagtgtgaggacacatgccacgacttgtctcaaatccactcccatctcttcttacttacttccttctgcttcaatccttaaccttttaaaaaaggaagcttgagagagattcaatttcaagtttcagcaaaagataagaccaacggtagaggctggagcagcccacagtcaaaactcactcactctacaaatacatacataataaccacaatacttatcataataaataaaataaaccactatgagcaattcgtttcaattgtgctcaatatcaaactttcccatttcataccacatataacatacgaataatgttaaaagtaacagtaaaattaactaaccaggaggaagagattgctttaatttatcagcttgctcagggtcaaagacacaaagtgtgtacaagtacttggagcatcgaacctcaatcttaactacatccctgctccttttgattttcaccaacctcgcatccttcctccgcgccgtcagaaggaaatccttaatctcgtggatctgcttaggctgttttgttttgtaaacacacacaacattattcatcggattcgagacacactcaaacatcgtataaatcgaagacaagtaaacgaaatagtagcaataccattgtggaattgctgatgaggaggatcacctggttgtggacgacaagggcgacatagatacccgataggggttctggggtggcaccgaacttggctctggagagggttccagaagacgaaaatgtcgggggcgagttttatggaaccatctcttttccagaagagaaagggtcttatgtggaggtggaaggagatagtggtggagttagaatagggtggggaatctaagggtttttggctttgttggagctaaatatggaggaaacgtcctacaatggagcgatttgggagggggggaaggttggaggtggaaggaacgcttgatgttggagaaccctagattttaaaaagttgagatagcacgtgggagagacatcaaaatatttaaaaaagaaaaattatcttcatagacgatttttgaaaaatcgtctttgattgaaaataattctaagacgattttgcaaaaatcgtcttagaatggtagtttctaagacggttttcgcgaaaccgtcttagaattattgtatttattatacaaaaatgtcaccgcatttctttctaagttggttttggatcaaccgacgttaaaccgacgtcgttaaaacatctttttgtagtaatgcgaagaaatgcaagcacaatctgaagacgaaggaggaaagcgaacaagctacaacgagatgaaatcaaacaaaagacaacaacaaccacctcaagctctcactgatggccaacgtacccaacgacgagatgaaaaaggaatgaagcaaaatgcaaaagagaagaaagaaaaagaaacgatagagaagaagaaagaagggaagaatatgagatagcgagagaatgaatggggtatctaggagacccctctcccttctctgatagtgatgccaaatgtcaccccttcgttggtttgttctctgctcttgggatccatgtcgctctctgtgtaattaatgcacaatctccttccttatatgtgtgctgttccacttgacctaatgggctttcaaagagcccattaggttccttggggacctttttcttttttaaaatattgttctttttttttgcgtgggacctagacataattagggtctgacatcttccctatttttttaagtatttattgtaatattatgcttgcaatgataaaaaaatggatgaagatgaaaactaaattatattttactattaaataataaacaaaattttggatctgacaaattagttcaatggaaatttactgacattttgatccaacgaaaacttactaacattttcatcccttatatcactagacttttttattaacagtaacaaacagaggttaacttatgaataaatttgtcgcacctttttttattttcagggactaaaatttgaattttcatcttttgggaacgaatttatcagcactctacacaatcagaaacaaaaatggcaaatcaattcactttaattagtgttaaggggtttgttgtgtagaataagaaaaagttttgcacctaacaagttacaagttcgaacatttacttgtctatttaaaataaggtaaatatagtgttttttgagtctagaatattttcaatggcatcaaatttctttaaaaaaaataaattcattctaatttatttgaattttctgtctccctattcaatgaacccccctaaaattacgttgctacgtaaccttatccaatcctttatattcaatagatgtgcggtgtgcggtgtgcggtgtgcggtgtgcgtggcaccgtgtatatactatttttgagtgtgtgccaagccacttttttttttttacactagatacctaattttttcaaattcatattaaagaataaaaactagtaaaatttgatacaacatataagacacgaatacgtcaagtactcgtcattagccaatattagaaaatagggccagccattactagttaatcaaacaaagcggaacctagcaagcacacgaaatatacacgtagaatgatacaacaaacaggtcagatttccttgtcacgaagaagatatgcactctgataccatgcatttagctaacaaatataacagccccataaggcattatatatatatatagcacaaactaaactagaaggtacaaattaatgaaagaacttggtgacattccttaaggaaagcattattgtccctaaacaaagagttaagagaaacatatttaatcaaagaccttcacttcgattttcacattgcttatattttgcattgaatgttgaagatgtctaaatgtgatccaaagccagaagaaaatacccagatgaggttgtctaagagcaacggatttttaatcaggagtagatggacgttcgtgggatgttgcaagagagcgtggtacaaggttcgaatgcatctctattgtgaaaaacccaagtgtcacgttaattaacgagatactagtgcatgataaaaacttgtaaagtttagacatcatcactttacaagttggttttataggtacaagttaggcttacaaaatctaaaatctccatggttaattgttgttaattattattaattttagttttgctaagcaatttatgtgttcagctggtgcacctttctcatgcaaaaattgtacatttccaccggttgttcattgttaaacttattatatatgtaatgtatatattgttatgattagcaaggaattcatcaaccccgcatccaattagtatccaagtttatgttgtgaaggtagttatataacgataacaaaagtcctatccactatcaacttatagtgttgtaaaatcgaagttatctgatattagttttcaatacaagcatttattatttattacatattacaaagagcaatgcattctttacaccaaacttttaatattattttttcagaataaaaaaattaaggtccggtttattttgacgttagaaaatcattttttgcattttctaataaaaaatacaaatgctgatataaaattatggttaagataaatttagatatatatattggttttattttgtaaccaaccttatttggttaactatacctatgggtagtcataacaattccttatggatagtcatagttaactactcttatctcaaccgctgttaaccactgttaacttcccatcataatcatacacacaaaaacacctttgatggaaaagatctatatataggtgtgtatcttcaatttttgggtccctgaactcactcgcatataaagtgcatatacaccatccagtgcaaattgagagaagagtttggaagattcaagaaatcacttcacattgcagtattacaacccaatactaggagcaatggctggaggtatttatattctatttcattccgcattgatctaatattgtttgtgaaaatgattagatcattaagtatataaaaattctaacgtttggtatcagagcaaggttcaacctctgccttgttttgagttttgagttttttttgggttttactggatatttgatttaaagtcttaaaataaagtttgattttaagaatcataaagaaaataaatttctaatgattctagactttaaatcatcatgaaaaatggtgtaaaattttatgaagtgtgtgtcattttattaagttttaaaacgacaattttgcgtgcttctatattcttttgcttaatgttgaagacaacttaagtttatgtcgttttattaagtttcaaaacgacacttccttttgattttgacattatcaagataacgtgcatgttcttgtacttttactctaaaaaataaaagcaagttcttgttttcaatgcttttatgatgcaagaaatgctattttgtcatcttatgctttataaattcatatcaaagataaaatattaaattatattattgagttatccataggaatggaaaatataatttgatagttttatcataaagtatgtataatgaataaataaatgtttagtgatctttataatttaattaattaaggtttggccaaagcacccttagttagttaaattataaattcagagcctctagatcacataaggaaaataacattaattgtaattagtcgtatgtaatatgataaatatcatctcacaagattatttatcatgtttttgtatgattaattaggataaaaatattaagttatgttcttaatttgcccacagggattaggaaatataactgatatgttttatcattaagttcatatgaattttattgaattaaaattttagcccacaaggaaattttatgtcactaaattcataattctttgagcatgttttacattggtaaagcatgataatgatttatttttgcctcaaattttaagaataagcatatattttgcaattgtacaacctgttagttctattgaagttcctgaattgagagaggacaattacccaatttggaaggagagaattctcctgaatttaggatatatggacattgttgaaactatcataaaacctgaaccaccagctattactgagaacagtgaaccagatgaggtggatcgttttgaatgggaaagatccaaccatctgtgtgtcatgttcattaagacaaagatctctactggtattaggggttcagtgaaaaagaataacaatgccaaagtgctcatgaagtctattgatgagcaaattgagacttcaggaaaagcactggccaatactctaatcatgagattttcatcaatgaaatttactgctttaaggggtgtgcatgagcacattttgcagatgagggacattgcggccaaattgaaaactttggaggtggatatatctgacactcttcttgtccattttatattgaacactctctcaacaccatatggtcccttcaaaatatcctataacacgcataaggacaaatggtctattaaaaggctcatgaccatgtgtgtttaggaggagggaaggttgtaattagaacaaggagagagttctttactgacaattgagaaaaatgacaagataaaatataagaacaagggaactggtaaaataccaccccagactggaattaagaagggatcatccaggtgtttttctgtaaaaggaaaaggcacatgaagaaagaatgttctaagttcaaacaatagtttgaaaagcaagatatgtctacctctttagtctgttatgaacctaatatgattaacataaatcataacacatggtggattgactctggttctacaatccatgtttcaaataccttacagaaacttaaggaaccagtgggcagtgaattgtgcatctattcagccagcaagatgagttcacctgtggaggccattagaacctgcagtttagttttaagaagtgattttattttgaatttggaaaagactttttatatttctaacttttctaagaatttaatttcagtttcaagacttgtaccatttggttattcctttttattttatgagatatctttcagtttattttataattttgatctcatagggaatggtattttatatgatggtcttttctacattaatttgtaaaaatgacaccacttatgacgttatgcatgttaatgttggcattaagcgatgtgttatgaatgaggatatgttgtggcaccggagaatagaacacatctccattcagagaattaaaagattagtgaatgatggagtacttagtactttagatttcactgattttgagacttgtataaattgcattaagggaaagcacacaaacaagtctaaaaagggtgccaagaggagtactaaattattagagattatacatacagatatctgttgtcctgatatggacatatatggttagaaatacttcatctcttttatagatgattattcatgatacatgtatctctacatgcttaataataagtatgaagccttagatgcctttaaggtatttaagtttgaggtagagaatcaatgcggtgagcaaattaagatcatgagatcagatagagatgaagaatactatggtagatacactgaagatggacaagcactggtccatttgtgaggtttcttgaagagcatgggattgttgcccaatacattatgcctggttctccgaattagaatggtgtagcagaaagaagaaaccgaacattattggatatgttgcgaagtatgcttaatagttccaagcttcctaagttcttgtaggcagtgtacatattaaaccgagttccaactaaggctgttccaaaacgccatttgagttatttaaaggttggaaactgagtttacgacatatacgcgtttggggatgcccgtctgaagttagaatttataacccacaagaaaagaagcttgacccgaggactattaatgggcatttcattggatatgctgaaaagtctaagggatatagattttactgtccatcccacaacactaggattgtggaatcaagaaatgctaaattcttgagaattacttgattagtgggagcgatcaatacagagactttgtttctgagaaggatcattcagttgctcaaccatccacttcaaacgcaaaactggttgttatccaaaatatccctccagttcaactgggtgttatacaaccaatcattcagaatccacaatctgttgttgatattaatccagtagatcaagttgttaacgaggaacaagaaattgttgatcaaccaattgagcaacaagttcatcaagataatcgtgatataacattaaggaaatctactagaataaggaaatcagcaatacctagtgattatgttgtgtatttcaagaatctgactataacataggagccgcaaatgatcctgaaacgttttcacaagccatgagttctaaggaatcaaacttgtggtatgatgttatcaaagatgagatgaattctatggcatctaatggagtctgggatcttgttcagttgcctaatggtgcaaaggccattggttgtaaatgggtctttaaaactaagaaagactcattaggtaacattgagatatataaagcaagacttgtagccaaaagatttaatcaaaaggaaggtatcgattataaggagacattttctcctgtgttgaagaaagatttcatctgtatcatcctagcattggttgcacattttgacttagagttgcaacaaatggatgtgaaaacaacatttctcaatggagatctagaggaagaggtttacatgaaacaatcagaaggattttcctctaataatagtgagcaattggtgtgtaagcttgagaaatctatatatgggttgaaacaggcctcccgtcaatggtatttgaagtttcatgatgttatttcctcatttggttttgtggaaaatattatggatcaatgtatataccagaaggttagtgggagcaaaatctgttttcttattttctatacggatgacattttgtgatctttataatttaattgattaaagtctagccacagcaactttaattttttaaattatattaagattctttagatcacataagaaagtgatgagatactttcaagggactaaagattatatgcttatgtatagacggactgataatttggaagtaattggctactctgattcagactacgctagttacattgattcgagaaaatccacttcaggatatatatttatgctagccagcggagctgtctcttggagaagtgtcaagcagacattgactgctacttccactatggaggctgagttcgtttcttgttttgaggctaccttacatggtgtatggataaggagtttcatttatgggcttagaattatggattccatttctaagtcattaaagaaatactatgataatttatatgttgtttatatgactatggctaagaataacaaaagttgtggtcgaagcaaggacatcgacattaagtatctagccataagagaatgtgctaaagataatacagtgattgttgagcacattagcactgaattaatgattgctaatcctttaactaagggcatgccaccatttaaatttaaggatcataatgatattgttttgataaaactctattgtgatgttttcatttagattatgtgcatctaaagttgttaatttttgagaaacatcaataaagtttggacctagaataaacgttgggtttattcattaagttatatgggattgagaaatataatgcaatgtgatacatggaagataatactcgtatacattagaggacctatcgccatgattcatgtattttatttctcattatgtaaatgatgggatatgttaaccaagtgggagaatgttggttttattttgtaaccaaccttaattggttaactatacctatgggtagtcataactattccttatgggtagtcataactattcctatggtagtcataactattcctatagttaactactcttatctcaaccgctgttaacttcccatcataaccatacacacaaaaacacctttgatggaaaaggtctatatataggtgtgtatcttcaatttctgggtccctgaactcactcacatataacgtgcatatacaccatccaatgcaaattgagagaagagtttggaagactcaagaaatcacttcacattgcagtattacaacccaatacaaagagcaatggctggaggtatttatattctatttcattatgcattgatctaatattgtttgtgaaaatgattagatcattaagtatataaaaattctaatatatttaaattatatttaacgttttaaaattaattctacccgactttaacacaaacaagtcttttaattgaagatttttgttgagctatggattttaattgaagatttgaagtgtcaaactatggatctgtttggatgtaagtttttctagaagtacttctagaagaaaaaaggaagaagaaaaaaatgaaatgaacttctccataagtaaaaatgatctctctattagttaatttgtagatctcatctcatcttttagagaagttatattggtgagtttctagaaattaactgatagagagcttatttttacttatggagaagttcatctcatttttttctcttttttttcttttagaaatttttttagagaaacttacccaaagagaccctaccgaactgatagagttagactattggttttaaatcagagtttgtgtgatagagaattttttgtactttgataaaacttgccttcagatgtacgtgttttcgttcaaaattgtggaaatacctttttaaaactaaaataaaataaatagatctcacgaaactttggtcaatctgccacttctgggcaaaattaatggcagaatgccaggcggagaaaagtatttgccgatatgccacggtgcatatctcgctagtaagagaggcgaagtacgttgctgattcggcgtgagataattggctgcatgggggctgctgacaccgacggaatccgctggagcaggccgcgaaatcacctattttgctgtgtcagacggcgaactacgtgcgtcagaggccaactcactacagagctataccgctatgtcaggccgcttattaggttgcatcttagctatgcatgatagcgaaatagagtatgtacggtgggccaaaatttacactttccgggaccactatttaaaggtagtgttccctctccaaccctcacacactccctcctctcaagtttctctcatccccagtgcctcccattgtctcccattgcctcccattgtctccgtgagtttttttttttttctttcttctgcttatgtttattttttgcttctttgatatagttttttagttgttaaatattgtttatcttggagattaaatgtattaggttacagaatatttttaatatttatgaatagttgtttagttaaaatatattttttttcttctgcttatgtttttttttttttgcttctattattttgtttatatagttttggttgttaaatattatttatgttggagatttaatgcattaggttccaaaatatttaatattaattagaagttgtttagttaaaatatatatgaaatattagagtgattttttgttattctaaaaaaagttaatacgtatgtttgactagaagaaacaaaaatataaaaacaatataaaatataaaatttgaatagaaaaaataaattacagtaagaaaaaatttaaattttaaaatctataaaaagacaagaattaattaattatattatacttttttattgtcactttctgttttatgaaaccaacttttaaataacaatacatagttttatttacccctggcatcagtaaggaaatatttgaaaaaatgaagatttttttatatgcataaatgataaacataatagatatgattaaaatatttttgatataaaaaatttggttggattagaaaagggttattgaaacaaatatagtatagtcactcgaaaaagggtataaaaatttagttatgaaatagataggatatttaatgtttattatattttttatttatgtagttttggcttgtcaaatattatttaaattggaaatttaaaatatacataaatttaagaatatttaagattagtttataataacttagttagaggatacatgaaagattaagagttttttttttgttaaaatacttcatttaatatatttaacttactttaatttataggaatgttattcaaattaattgtataatgtagttcataaatataatttgaaagatagaaatttattaaaaataattatatctgattgttagttgttttaggttagtttttatttttattttgttgcctatttttaataaattggtaatttatatttttgtatgtttttaatttatttaatttttttgtatatttttataaattgataatttatatttgtgtatgtttttaatttatttggatttgttgtatatttttataaattgataatttatatttgtgcattggcctcttcaggtagtttttgtttttgtgtatatttttttacatattgataatttataattttaatttttattatattttttatttatgtagttttggcttgttaaatattatttatattggagatttagaatattaggtttgagaatatttaagattagtttataattacttaataagaggatacatgaaatataagagttttttttttgtaaaatgcttcatttaattaatatatataaataaatttaatttataggaaccttattcaaattaagatacaaatttattaaaattaattatatgttatagttgataaatataattagttttgcactatgttatgttgatcgttagttttttttttttgtgtttaaaaaccaaatccggaaaactatcaagctttgttctgcttcctaattagtcacgccccatccaggcgcaagtggttacgcccgacataggcggggcttaacacccttatatattcaccacaccacacacgagtttaatcatcccacacaacacacctccgcaaactccctctatcgcaattccatggccttcttgggtgaaacagggtctcaaaacattgataattccaagttagcatttattttttcgaatagatcaattacccacaacgaaatcggtgtttctttcgtatgtgatactcctacaccaatgcgagttcccgatgaatgttccttttagtcactgaagagtagaatgcacaacacccttctgctcacagatgaccagtctatggatgatatttactatcgtcaaccgtcaatcaatgcagttaacggaattttttttcattcgctgcaactgaaaaatgatgatgatgtttgcattatgttggtgtgccatgaaaaactccagtctgttggtcctatagaattgttatgtatgataaccagaacaccccagggtgtcctgaacctacttcagtccaccatgactcctactcatgatgccatgttgtattacaacggcaagtggaacataccacgacgaggcaattttctgggttactcgtttactggaacaaatcctaaaagatttgaaattccttccggatgcaatatagaaacactgaagcatataatcaagcaagttgctccgccaggagttcccccttacagaattgttgaatcacaggaagtcagacacttgttcttccaacaaccaggtcacacaaagtattcagataccttgcttaactacgaaataaaacaactgaaaaacgatgaagatctacttaagctgttagcataagctaattactggaagcgtttctgtccaatagaaattttagctgcttttcacaaaccagcaatcgaactactcgaagatgacatgtccgctgcacaagatattccaaattatgaatagttgcgtcattttgatgtttcaattgttgttcttagtacgttccgatgtgttgctttgtaatgttcaacttattgtgtttgtgtttgtaattccaaccctttgtaccttatgatgtttgattcggtttccatgattgtctttgactatgtaagcgtatatgaaaattcacattagttttggcttgttaaatagtatttatattggacatttaaaatattaagattgacaatatttaagattagggcaaaactcctattgaattagtatagaaattaggaaaagtaatgaaaatgatgtaacttttctccaaaagtggaagcagaaaaataaaggaaacatgaaagaaaggaacatattatgaaaaacaaagaaagcaagaaagaaaaaagtacatattaccaaatgaaacattagagaaagacatgatcagacgttttctttcttgctctgttttgcttcttctcagtgcagagtgaggagtgaagagagtgatttgtgctgtgtatacagaggcgaagggaagtagaggagaagggggggcccttgaaattatctctggggctctccttttttatgctttttccaaaataccctaggtcacaaaatgtcaggccatttttttgattccccttctcttcctgttctctcgttttcaggctccccctcgccgggcccttgctgcagcccttctcttcttggttgtagtttagtcctttaaatttagaatgttttattttagtcgcttatagtatctctattagattaaattggttcttcactcattttttggcactaacgcgtcaattttgctcgacaggacgtccatctaatatagcattttttacaatttttcatgtgttatcaatttggccaagtcaatgcgataaaataacacaaggactaatttggtctaatagaaacatctttgatgtccatctgatagtagcatttttcacaatttatcatatgttatgaatttggccaagtgaatgtggtaaaataacatcacaaggactaatttggtctagcagaaacaccttgacggatcaatgaggacgttggtcttagtgctgtccttccaaatcccccaaaaccaaacctttctcacctacaaaatattccactattccttccaacaggaacatacagtgtcattatggccatgactattgcggaatcaaatcacgctacgaaggcactatttctgtaacccaagacctaaaccctaatcacaacataaggcctaacccctaaaccggcatccataaaccctacgtctgcaacccaagtactaaaccttactaaccacataagcctaaaactaaatggaaaatacataaaccctaagtctataacccaagcctaagtcagaggatacacgaaattaggtatagtcaattaaaaatgacaatgttgttacactaggatattaatttgcttgttaatgaacgtatagaattatttaattttacatggacaaatttatatacagtaatggatgacgatcaacatgttccaccgacaccatcggatgcgttgagcatcattgacccaggtccatccatacggagtctccttacagtacaggagaaacatatatccacctatgtgtggaattcgcaatctgatccaaccatgcgggatcgtatacttaatgttcgacatgccgcgacacacaaccatatggctatacctgaggatatacacccgtggcttatagaagctggcttttatcacgttgcgcgcctgcacaatcacgaggttcgtatattcagtgttgtgttaatttcctattagatgtattgattgtattgtgatgtatacgtaactgttgtgtaatgtatgttttcagatcgaccatcaccttgtctccgcgcttgttgagcgatggcatccagagacacgtaggtttcatatgacgatgggtgaggtcacaatcaccctggaggatgtacatcatgtgttgggtctgccgaccgatggtcatgttgtttgtggtcgtcacggacgacataactttcgagccatcattggtgacatgttaggggttgagccggctgctgatcgtgatttgcagggcggcttgttaaaccttcattttttgcgtgagcagtttgatgtttatgaggtccactcaggcactgaaataggacgtcgtagatacactcatgctttgatattaagcatattaggcggcatgttgtttgttgacacctcctcgagcttcgtgccagctcgttatttgttatatttggatgatttccagcgcacagggacattcagttggggctctgcagttcttgcagaattgtatagggagttgtgtaaggccacacgtgcttcacgtcgtgagatgggtggatgtgctttgttgttacagttgtgggcttggacgcgattcccgaccatctctcctagccttcctacgatggaagaccatcatgtcatacagcacgagatatatggccacaggttttttttatttcattattagtattcctcattttttttgtctttgcagtatatattgtttatatttgttgttgtttttgttgcagatttaatgtataccatacgcgacaaactgtatataccaacattcgtagatatcgccatcatattgatgtcatgcgaaggagagacatacgttggaggccatatgaggttgtagacgcagtccatccaccggatgttcagatggccaggagatggttggttgtatgtcctcttatatgttatgagattgtcgtataccagcagccggatagagttatgcgtcagtttgggttcgaccagccaatcccagaggagcctattaattgtagtgagctgctgacgattactattaccggcaagacaaacgtggattggagtcggcgtcatgttttctttattcaacaatgggaaaatagagacgcccttgtgttgcaggacgtgcaacctatgcggagagacgactacctatctgtcaacagcgaatacatgcaatggtactactcagttacccgtcgttggatgacccataaagcggctttgaaggcacatgtggtatgcatgttagttataattgtgtaatttgcagattagtttacgtgtaatgttcactaataattgttcatatgcagaccgattgagcagagactgttgtccacatgctttcacctaaggcacatggggcatttgacatgactcagatgtacgaggaggcggttcgaatgctggctgcatgcgacgatatagacagattaatagatcctggagatgctacaccgccatcagtacgacgtcagactgaggccccgccaccagtggttcggcctaatcgacgtgcgcgtcacgaggggttaccccttcaccactcgactccatcagttgcagataccccagtggttgtaccacctattcctccacgccctcctgggatgttctgggcacctgggtacccttcaggccgctcacaacaatattggtggccccccagtctgttcctggatcacagtaccccccttggggagctggaccatcgatgttgtatgccgatgtcccacatgcatcataccccatgcattctgttggccccagtacagctgggccaagttcattaggaccgtcttcatctggtttgcattgcacacccagatcagacacatatgaagactgttataggcccgctgctccgactccaacatcagaacaggatatggtttttgggactcctattgaacggtcgtctcatatgacatattctctgagtttcggacagtattctacagatgatatcattgcggtaatggatgagggacatgaacaaaacatggacgatggttcttatgacgttcagcacatcattaggcggaatccggttagggaagcgcgctttcgatgcaatctatcaccgtatgaacataacatgagccactgtggaggattccatgaggaccaccaacaagatgactaaataatttttttccctattagtgacagtacgatgctctttaattctatggcaacagactgttatatggatgactgtataaacttttatgattttgatgtattatgcaagacaattggactctactaatattcgataattattgtttataaaatatttagcacgattaacattaggatcaccaccaagtacattattggttctggttgcgtgatgggcaattacgcctattgtggccgacaaccttacagtagccgcatgttgttcgagtcgtcgagccttccctggagtccatttcatttcgtatgcgtgtactgtttggccttccttttgtacgtctcagcgacacatctggtataacaattggtggtacaggtggtggtatgaactcctcattcccaatgggaaaccactacggtgcatacacttgacattgatacgcagcactgtatacaggatctacatattgtctaggatcatggtgtgtcgatcgacatgctgcaataacatggctacacgggaacctatatgcagtgaactcaccacattgacaattccgttcagctaaggagaccgaccattttttaccgcccgaatgagttcgtatattgtacgtttcttgaacctcaaatctcgtcctaagtgcgtcaaaacaagtgacgtagtgcgttgccgatttatcaaccatcctcatatatttttgtcatgctaatttggagaaatgattacctgtcgccatctcctcatgggcttcttgaccatgtgctacaaagtatgacactaaacgcgcgtatgtgaactgaacaagggacgtaattgggaggcttctggctcctttaagtaccttgttaaagcattctgaaagatttgttgtcatgtgaccaaaccttcttccctgttcatcatacgctatactccacttctcctttgggattctatcaatccatgttgctatttgaggacttgcttctttaaatgtttgtaatccggcatcgaaatctaagcgcgaggttgtataagctgcacatacaaacacgatgtaaagaacaacacatacgatggatatggtaacgacatgtataaacactgtgttgcaggctgatagacatacctaatttcttcaattgcttcttcaacatgacgttgttgaatttgtgattaaaattactcgccaaatgccgaatgcaatacacatggtacgcccttggtggattccatcctagttcgacattgtttactgcggcaattatgccagcatgtcgatctgaaataagacaaatttcgtctttttgcgtaacatgtatacgaatgagtgccaaaaaccatgaccaattgtcgatattctccgcagaaacaatcgcaaatgcaataggaaggacataattgtttaagtcaactgaggttgcaatgagcagtgttcccctgtatttcccatacaaatggtttccgttgatgcttatgactggtttgcaataattgaaagcatcgcaacactgtttgaatgtccaaaacaccctattgaacaccttagcacttgcatctagttgaccatcaataaaatggtcgtgcaaatccagcttgtatgcagacccaggagaaaaatgtaacatgtaacccaatcaccttggcaaaaacgcataagactcatcccaatctccaaaaatacgaacaatggccttttgctttgccttccatgccttcgtgtatgatatatgaaatcccaacgttgttgttatcctttcttgaatcaacccaattttaacactgggatcttccctaatcatttctgcatttcgtcaaacaataatacattaataaatgatttaatcaataataggacttcaatttaaaatatttaacatacctaagatcaacgaacatatgacatttgagtcaagttgcttgtgatcttgacaaagagtctgaccgacgcatgtgtgtaggttgttccatatgcctacaacccattcggtgccacctttttttttatatgccctcatcctccatgtgcaaccatccaaatgattttcacaaaccataataagccttttcgtatcacttttttttacaatcgttgtgcgatgcttggccatacagtattgttttattgccaattgaacatcccacttgctgtcaaacacctggtccttatatagctcatgtcccatctgccagttaggtattcgcaccccttgcatatcctcaatctcttgatctgggtattcccaattaatattcgtgtaatgactaatatcagaccaaaatggaacgttgccccctcctatattatgcgacattagccacattgttcattaaacctaccaaaaaacttaacactattgacaaaaaaaaaacaattttaattcatacctacaacgggaggctgctcctgcattcccacattgcccggagaaggaattggaatagcacgatcgaaatcaccatctacgtcggtatctgatgagtcactgtctggaacaacaccttcatccacctcttcctcagaagtatccgtaggccaagatgggtcataggccgccaccatttcatcctctgttgcttgacttggtggtgctggtgtgtccgatatatccctatgtccataatccatttcttgggtttgttgggttggtactggtggagatagggatacatctctgtcttcgagattcacctgcggctctctattaatgtcaatggaaccagtaggttagacacattgttgactgcttgattgaccaccacagtttaattctgcatacagttcgataaatctaggattttctccatcggatatgcatgcgtcagtaactaacgctacatcgtcatcatctacaatatctacagcaacccactgcaccgggttgcccgatgcacatctagcagtcaatcaagaggcacgttgtccgcgttgtagtctcaacttcttgtaaatcattttcattagatcacggtggctgcatcctgggggcatgcgaaacattttactttctccttcaaaaatttgaccattaggtccaaaatatctactcccattataatacacaatcgtgattataacatttgtactattacttattttgtcgtgaaaaactcaaaaataacagaacaatgtcttctagactgaagaataaaaaacctaaataatagaagatgactactgatgtaaaaataatgggcgtaaataagactacattccctatgcaatatagtaaaatatatcacctatttcgttgtgccaaagtattttggcttcaaaaatcacaaagcaaaataacatataaaaaatttataaaaaaaaaactattagaagatgactcctactgtcaaaaaaaagtgtaaataggactatattccctatgtcatatacgaaaacatatcacctatttcgttgtggcaaagtatttccttttcaaaaaacacaaagcaaaataacacttgaaaacttaaaaaaaattaataatacaagatgactactgatgtaataacaaggagtgtaaataggactatatttcctatgcaatataggaaaatatataacctatttctttgtgctaaaaatattttggtttcaaaattcacaaaccaaaataacacaatatatatcgattgatgtaaaaatcaaatacaataacacacaactttctaaaatcacaaagcaaaataacgtaatatgtttcgaatgctacgtctgtgaagctcaaggggtgtatatagaccaatgaagactaaattcgctgaaggggagagcaaactatttcacatacttcgcagtccctcccagcaaattcaaattggaaattgtacatagttagctaaggtatcaagcgaaattcacatacctagctatcaggcctagcgagtttcgtaccagcaccggggtccacattacctaatttgctatcagcccaagcgagtttcgtacactgggggcctaattagctatcaatcctagcggatttcgtaccagcaatggggtcaacattgcctaattagctattagtccaagcggatttcttagtgcatgtggtgtcagaattcctaattcgctattggttaaagcgcattacattggccactaattgcttgccaactcagaccatgaaagccgctggaatgcctagtgaatttttcggtgtggcagtttgacaattttattttacggggtggcacttaaagatattatttttcaaattgtggcattttgaaagttgattctagatctcacatacattaaggcaatagattttgaggacaataggatgcatcctgattaataattaattatattgatatcttttatatttgaggtggatagccatcacggacgcaaagttccgtttcctaaaacttgtctgcacactaagggatgaatacttcttgtaccttttcatcttctctataaattcatgtttttaatattaaaaaaaagcatgcataacatttccctttttatctgcgccagatatataagtcctcgctcttttgaaaaaatcatccactatcgttaaaaaatatgatgcaccatttgaagacaatgttctataacgtctccataaatcacaatggattaacacaaaagcatcacttactttatgatcacgtactcaaagaaaaaagtatctctagttttcttggcattgtaacacatttcacacactttattaatagattatctatacttaccacttatattggaggtgatgataaacaaaaaacttatattggaggaaagtttagtgatattcaaggaaatcaaaggtgtcctaatcttttatgtcatagtttcaatgacaatcaaggttatttattaattggtgttgttccgattttttggtcaacatcgattagggttgtttttaggtcgatgttgattaagatatttttaattgatgtttatttttttgttgacatcatccagaattttttgactgatgtcgagtgatgatttttttcagccaatgtcatcttgatttttttttgccaatgtttgccgtgtttatttttgaatgatttagttaaaaaataacatcgatcgatgtcagttgaaagattaaaattaattaatattttatatttaaatggttgacaaatatcatattttgagagagtcgaaggattcttcggttgcttctattcgaaggaactaacattttccatttacgaatgtaacaccttgatttttcatactttagaaagttagaatgaaaataataaagagttgattgatgactaatgtagtagctttacaaatagtgaaataattgtcatgtgtgaagtgttctagaatagcaaagtgctctgggattttaattataggcttaaaaagatgtgtttcaagctttaaaaaccttggccaaacatctagttaaaaaaagtcaatgacagtcaaaatgggttaaagtaaggaaatatcctcattaataacatttttgtaattacgcgatttttgcttaataaaattatttaaagtataatcatgaaattagttaaaaaaatctattagcatgcattaataattaatttattgagcattattagtattttaagtgtaataaatttgttttaagttaaaattgagtgattccaaaggcatgtgaatttgaagaaagagaaaagtgaggtactctaacatctctctaggttcctcattccttctctctagattttcgtaattctaatcttctgcctcactgctcattttttgatatgtgatagaggagcttaagctctacaattgggtggttgaagttttcgttttgggacttggcacttggaagcaaaggtaagggggcagagccctaattttagtgatgtgataatatgatttatttgcgttttttgcctctgtctgagatgattggtgtgttatttcttgtgtttgagttcaaaaatgggttcattggccccaaaaatttaggaaaacatataaaataggttgaattgtgctttgtataactctaaatattacaatttcaacgtttgacctcatttatggtgttttgccttgttttgggaaaatattgatattgttatattttaggttatagagaataaaatgtaaaagctagaagttaaaaactaaaacattagaaggtactaatttttatttatttttacaaaacaatactaatttatataataaaataaacttttgaattagagaaaatctatctcttagttagcaaatatgtcttttagtgacctaattatacatttcagaatttgggacaattgggttggggtttcccagggtgcaaaatataggacgattgactttagaggaatgggtaatattttcaatcactcaaacagtgaagatcaagtcttaatacaactcttttttcttcttaactctaatacatatctcttaaaatctaggtctaaggaatcaaatatgcaccaaaatatggagaataagaccatcgaagaaaattaaggtgaaagtacttttaaattttatctattataaaaaaaaataagctgagttttccaaagtattttcagattttagacattttatttgatgatatgaaacaagtatattagacaactgataatatatcttatatattgaattcgaattattgagaattcaatatggcagagttcgaagagaaagtgaaggtacaagcaaagaaggccatagtcaaacatagtaagaaagcttcctggagcgtgcaagaaacggtgggtcaagctacagaacaattaccaaatattattattaagattacttaatgacgattcttgcaagaacaagagaaaggaaatatttaggtccttgtacagaacaattaacaagcaaagaaggccatagtcaaactgtcaaggacctcaaggagaagaacaagagaacggaatatttaggtaatcgtcattaattaatcttaataataatatttgttaattgttctggaggattgaccagtggaaagggcactcacacgttacgcagcatagttacattacttgttgtatcgcccttatagaatttatttattcaatggaaattatagaaacacagaatttggatgaatgttgcattctttatatttttctttgtcgggttgcgtttctttttttttttttttctcgttattagttgatgttgaagtatttggatcattcagtgttttttgtttttgacttctacagaaaattatgatgcaatgatatgtgtgaatcatgtatgatatggtacaattatttttaaattatataagataatatacgtgtaacatatatataattcattgtcatcttaactcacttcctattatcttccaggaatggtactatcaatttcataactcattctttccttaagataacccataaacaagatacagtttataagaggtcatgcttctatgtttctatattatatacatgcttctatatatgcatgtcttgttatataactatattaaatttttgtaactttttataacgacttagataattaacaaaagtatggaagagtatcaatatcaaatacatatcgaatagaatacaatatgctgagtcaaatgaaagagctgaaccatcatcacagtaccaagtaaattttcgaccaactaacgacaaattcaacaccatactcttcaccatgaactcagtgaacaacatttcatttctcttggactgtacacccccctcccttcatttcctcctcacaacaaataacattaaagtttcccatcatacatcacacatcctcacccttatcctcttttagatttataatctcaccccacataaatttttttcctactcatttcacaaggcccatacacccccgaaatagccacctcacacaaacctcaaacacacctaaacctcccaagacatgaacaacatccctcaccaccagacttcaattattgcaaatcataataatatccccagatctcccttctgcttttttaaacgcaaaggagaagtcgtcagacctccacaacagagcacataactttctatccattacctcaactttcatttcttgtaaacatgaaagcttaggggttgatgttttgatactaacctatgtacctcccttttcttcaacctccccccatgcacccggatgttataagatcttcataggctaatctttgtaacatctccccctcctcccaacgttctacctttcgtcatcctatctctactttccataatgttgaaccaatacctatattttgtcattctttaccacacccaaagcctcccccatcacctacactcgagcctcgatttgaaatgtctcactatgcagagcatccctgagaatgttatttgatgaactgttcccttgttctccaaaattcttcttcttaacaaccttcctcctctgttttgcgatagttgtttctacattcacaatacccactccttcacagaacaacccattattgttacctaattgtgacaatagtgggtttctactatgcttctcaaccctctcacaccccacaatgagaaaacaccatcaatccactcacatactttcgacgggcgtttccattcttattggtcaagtccccgtcgcccctcaagataacctcagaaccacccaaccccgtaccctttgattatctccctgctcacaaaccagtccccctccaccacggttttgggacccaactttggatcaccaaaatcagtcaacccaaactagtcctccataacaaccctcttaccctaatcatgaatgacaaataacaatgtgcaccccaggccatcagagaccttgtgagactcctctaggtccaccttcaagttggtcgcatcagtcttattgtaacatacataagtgtcagatatattttcctcgcattggatcattccttgttgtacatgcccaagcatctcatgtaacaccccggatgaatcacaccggaatgaaagggattaagagattgtgcaaatatgaaactgtacaattgaggatgacttaaaagaattaatttgtattatctataccaactacttgcatctacttttcggtaacccatcacttaagaacttcacagttaagtgtgcttgacttgtaacaattatgggatgggtgaccttctaggaagtttttcaaaaagcatgtgaatgagtacaaaacacactaaaaagtaccatatgggtttatggagactgacattgatcctaaaaacagtggaagcattgtctgggtctcagaaagggctacctttgaagggttctgaccaacaaagaagttgagtgaagtgtcatcatatcatatatcgtagagtgtgagtcatccaaaagtcaacaataaaggatgttacaaatggtatcagaacaaacatatctcctactacggtatgctttgagaacgaaccagatagaagctggtggacatgtaacattctggatgaatcacaccgaaattagaaagggatttaaaagttgtgcaagtatggaactctacagctacaaatcaagatttgttaacatgtgtaatgatgaggttgaaccatttatttttgttttatttatttatacgtcaattacatggttttataaattattagtccaaattattttttcaattccattggatgctttacaaagggtttgaatcatttgtgccaaaacgcacaaacaaggattccaaaatatggagtgtttgtgtcactttaatttgtttcccagtggtagtgtggcagaaaattgacagggtcatgctccaatttgaactttgtcaagacaaaccaaatccattgcataatcttgacaaactccatcaaactgacataagaggatacaatgacacaaattgggcagaagaacatcaatagtggattgcaatttggaaggaaaagacgcaaatatgtgttaatcaaccaacctattcaaggacatcttgaacatatgactcattacatgaattggtatcaagcaaattaaaaaatttcctaacatggtttgtaactcattcaaacattgtcgccacatcttggtcagctccaaagtggaaactaaacaacatcctccaccaattgtcgccaacatgcatgatgaagaactacaaccacctcctcaatcatatgaatacacatcacaacaatatcatcaatattatggatacaatttgcaattcttcaatgctagcaaagaagactttttgagcaacctcataggtatagatcttcgaacaccagaatttgtttatacgtacatgcaaagtatgctcatacctttatttgcatcctttcatcaaactattgtcgataattctttaatcaatcaaccaaatattaatgatttcgtccaggaagagcaacctgttattactaatgaacaacttcaactacaagaacatggatgagtaggtcgacaaccaacaagaaacaagcaacctctcagatggagaactggtggacacatacaacattaactgcttttgttaaattattgtgtactatgaatatcagtttgtccttgtttattgattgaacactgagcattgcatttattgattgagaactgcattttgttgagacaaattgattgaacattgttttttttcgatacgatttgacctcacattgctttctttgagacggtgtgactgaacgatactttttacaacatgatttgattaaacactacttttttcgaattacacagaccaacaataataaattaagacacaatctaaatcatttaaattgtcaatgcgatctcagctgttagtataagtcacagaagaatagttgatcacctaatataaatagtagtaaggattagagtcaactcattacttttgtctgatattcaccatattgcttaaaacatggagagtgtattcaatcttgtatattacaacggtgacatggttccatcatatgaagggatagtgtttgaatgtcctagtgatcctaaaatcatcacaataagtgaggacatgtcgcttgataccttaaggaaaacaattttttacatcaacagaggtaacagaattttacttgatcttttttaccatcaaccaatttacgtaggtgatgattgtgttgaatatgactgtatggagctcaaacacgacgatgatgtggggaaaatgtttttcatctattcgaaatttagtaccaaaggtccaattgagatggatgtaacttttggacgttctctagatgaaatacttaccctactgcacaaactaagaaaaccaagaacatctaatgagattattgctctaatgtgtgatgaatctgtgtagtcattacacaaactagttgttctaacttgtttacgtacttaatcatgttagtccctgagttatttatctaagctttctttatttattttttcatgttcttcaatctagataaatttgatttcgttttttctcttttttaagtacatttacttttaaagtatgccacctaatctaaatatttcatttaaggattaattattttttaaaaaatactatttattaaaaatggattgcgagtgttttctttaaaaatatattaatttaaaatgaacctttatggcatgttgtatgaaattgacaacatgatagaaagatttataaataattttaaacaaaataaatttaatataaaattaagaataacatatgccaattaaaattttattttatataaaaaaataatatatatatatatatatattaaaaataaaaaaaataaacatttaaaaaactcaattaagaaaaaaaatgatttcttaaccgagtttaaaaaaaaatacttttagaacttaactaataaaaaaaataacaggtgaaaaatttgggaggaaccaatttctcactttgaacaggaaaatgtatcattcatgtaaataaaattttggatgtattatatggataaataattaatttatttgtattatttgggtaaacaaacctctttatatatcccctaaaaaaattatatataattactattataattacaatttataaaaataaatatattttaatatattaattatattttgaatttaaactatgataaacgaatatttttaattattgatatttttcaaaaacttattgaaatttaatttataaatagagatagaagaagaaaatttgagtggaatagagtagacagtagacactttaaaaattaagtatacatatataaataaaaagaggagggtaattttaaatgattgagaaagaaatatttttgctagctggataatgtgcgaaatgaatttcaaaagtaaaaatgttaagaatgactaattgaaaaagtggagaacgagagtctcaattctcatttatatataatctaatttataatacaaagagtagttataagaaacgtgtgttattagaaaataaaataagaaaagtttataggaggtagagtttttgccttgttacatttatacagaagttgtgtttttttctctttatagtttttgggtacgagactagttattttttacgaaaaataatcatacttgatctgaataagaatatcatgagagaaaaagtttcttatgccaagtaaataatgcagtaaccttgatctcaaaatagcttatcaagcttaaataaccatgcaccaattgagacacaattttctaacttataatttgacttaggataaaaccataaaaatttatagtatgggttttcaataaaaattgaaaattttctcgttaactcacgggataaagattcatatcaaagattgacatacattaccaacgataattttaattggaaaacaaaaattgttgaaataaaacaccaagttcaattgttattcgatttatgtcattggtcactttccaaaaatttggacgtatattaatgttaataggtttcctatcgttatctacaccattaccatacactttgtatccaaactagataattgatagttgaatttgctgtgccagtgacaagagtacgcaacaagagaaagcaattgatgttgtggaagttgacattgacaagagaaggcaacatgggaaagaaagcaaaatccacgtctataaattttgagtgcaggttagtgtgttaagtgtattattgatattgtggaagtgagagatggtaggaccagtgaggcctcaatttgtgttgtttggttcgtccattgttgagttcagttatagtgatgaaggttggggagctattcttgccaacttgtatgctcgaaaggtacttatatagttatgcttcatgttgttattgttcattccattattgttttcttatcttctttgtcatcaggttaattaatgttgtgctttttctctttttctttcattgcatgcacttgatttgcacaatcttgggttgtgtggttttaaggttattcactcactttcttttctagcttcagttgtgaatgatgattgcaagagggtaaaagttgctggttctccattgatttcacatgttgagataacccatgaagaattgttttgttttgtttatgaactcatgtttcatatagagacctgggtttttgtgatctatggatgatccttattgagatttgtttttgttcaattttgtttgtgtttttaatcatcaattaagaacaggactgcatgcacgcaatggaacagttccttttgggaaaaaagaaaaaagaaaaagtttctatttatcactaactcggattgccatgaatatatgcaaagtaaggctagtcgttttcttgtggagaaatgagaaagtaagatgcaaattattgaggaaaaaagttatttagtgccaacataagtcaccatattgagaactttttgaggaagtggtggtcctgtaatccaactggattagcaattagacaaaaagtggaaatttcattgataagattcctccatatccgaatttagacaatacgagaaaatatcagaaatgaatgtacaaagaaatgatgaaaaggaaaagatgaatgctatgacagattacacactccaagatgtttgagacccctcgcccctccatcattctgtctttcttctagcacaagggaacagattagagtagtatctaatatttgaaatagaatggttaagaacacatgcatataaagtgtctatatttgaaatacaagactaaataacaagcgttttatttggataaacttttctataagaactaatatgaataaaaagaaaaaatgaaattaaacttctgtcgtaagttaaaatttttttacacattagttaaaatcagtttttgaataaactaatttgagaaatcttttacatatttacttataagttaattttaacgtacaaggaagctttaacgtacaaggaagcttacagagctagtcaatttacatttggatatgctttttgtgagtttagcattatgatggtaaaagagtacaacttatcacacattgacttgacataggcagatatagttttgcgaggatacgctggttggaattcaaggcgtgctattcagaatctggataaaatatttcccaaggtattgagcatgtgtggtaattccgtgtgttgattcaaaatcacaccttttcttcaacttcaatatctcatcctttcttgacaaatgataaaatgtgataattttatctgtagttgtaaccatagttttaaaaattgactcggtgattgatccggtcagagtattggaacactggattggtagtcaaaccggtggatcactgattgacccgcatgaccccgtcaatagtcggaccggccagattggtccagttttttaaacagtggttgtaactaatggaacctcagctagctaattggctagtttatgctaaagcctagattaaacattctagcatatgatggccttctatttgccttagaactgagcatggatatattaagaacatttgtttgaagtttaaaagatcaaatgtattattaaaaacttcattttataattgcagcatgcgcgggctcacacatattaatcttcagattcatttttgcacattgtgatcactttgattatcgctcagactgacttaaagggaatcaccctattactctgtcatcttcaattcaggatgccactgatcaaccatcactggtaattgtgtactttggtggtaatgattctatgcatccacatccatctggcctcagccctcatgtacctctccaagaatacattgaaaatatgaagaagattgctatccatctcaaggtaaacttttacacagagtacaagtttcatctctttttccacacattatcacttgaaaaaaaaaagttatatcttctagaattcaactattatttatttatattgattcaagcattctttacgtccatatttatttctatgaaatttgacccaaaatctctatggttgtcagagcctttcaaagaagactcgcataatatttctcagttcccctcccatcaatgaggtgcaaatgcatgaaactctcaggttctgactacaattcattttggttattgtatataacttcacattatcttgaggctatgatagtgatgcctgcacttctattttttttattaagactatgcttttatttttgctatatgattaacaaagacgcatactgttgatggtgtgctacttgcaacctcactgacacacattctcataaactcgaaggttggtatttactaatataaaagtcaaacctgtaccatggctcaaagccccaaaggttgtgatatattggtattcaaacttgaggctaagcttcaacactggcttgtgtgatatgtaaaacttggcatctttggctttatactaacaagacccgaatctattatgctaggacatgataaacttggaggattgaaggatcgttcctaatagatttgacattcttgttaactgattttattaaaaaattcatctcaatcttgtactctaatgaattaatggttgaactgaatccagtgatctattggggccactaagaaggacaaatgaagcttgtcgaacatactcggaagcgtgtttggagctatgccgcgagatgaatgtgaaagccattgatctctggtctgcactccggcaaaggcatgactggttagacttttgctttacgtaagtatatatatgtcaattgctcaatgtctaaactataatgtatctgaaggaaaagtgcaaatatacttaagttccatttgatgggggtggtgattgatagggatgggattcatttgtcaaatgagggaagcaagatagtggcaaaagagatattgaaggtcctcagagaagcagactgggaacctagtttggactggaagtcaatgccagttgagtttgcagaagattccccatatgaaccaattggtgcggatgaaaacacacatagatgtctctaactggaacaacatccaggaaaagtctcaattggaaatgagtaattgtgcattgacaagaaatttagctcaattgattaagtaggatgcatatttcattgtaaattcctaattcctatcttcgattcctacaaataagaaagaaaaatcgtgcattttcaagctacataaatgcccataatgtgttacaaagtggcagggttatattacttttattgtgattaaagaaatatggtgttcttggtgcatattgatcatttgagctagttatatctggtttttgagcgagtgttgtgaacttgtgattgggtgtcagcatcttataattttatcacgtccattctgacagctatatactattgaattttatgcactaaaacagtcgaactattatgagcaagtgcataactttattttcgcctcaaatcatgatttattagaacaaaaataatactttccttttaggtcaaaccataatttgaaaactaacgttgatgctgccagattattacattcttcagaagacccgcaagttccttttcacaaaacccacctcaccctgttaatataggaatgtctcacaaagacatgaatattaaaaggtcgacaggtacaattatgtttgggaagagttgcattatacatcaacgggtcagtagaaacccagtagtctcttgtgcacgatatattcaattacataatcagaagaatgtgttgcacaaatcaaacgaaggaataatacatacaagggtgacgaacgaataatcaagacctaagtgggcaccacaagcacccacctagtgattacaccgcaggaaaatgattctattcggatgctgatcagccaactctatagctttcaacattaaaacaaaattaggccaatgcacatccgaataaaagccacttcaagtgagattttgcgtcaagaatactcaatggctccctttagaagacactcttccatgctatttcctttatgaagacaattggaacctgccactaggcttctttcttctccatccctgatatttccaaactcaaaacccttcagtatcagcaagaacattaacatgcacaaaacaaaagaaaattttccataggtaaacttacaaaggcagcataatatacaaaagtcaatccagccaatgcaacaaatgcaatctgaaagacgttgtacctgtgatgtgaaaaatgcataggttaattataataaggcataaaaaatgtcaataccaaatactacatgcaaaccctagttaactcaccacagataatcgtaaaaactactcccctgatgtgggcaatatagaggttaatcatattaaaagtctcaaacacccaaaacacacaacaagaaaaaaaaatctctgctggtcattagatctcaacaatgtgccatatactcgtgtctcatgtcaatatctggcctgcagaatttattttatgttttccatattttgggtgcatgaaatgtgaatagaagcattccacagagaatctcaactgtataagtgatttatgggagttggaaggaccatcccatcacatggtcacaatttgcaagttaacaaaaagtttaggttctatacttcacatcttcacccagtcagagggttgggggagagtgaaggaaaaatatccagcttgacttacttgtacaaatatttaattccacgaagagactccaaggtgtggccaaatatttcctgcgctgcagttgcttgagcatagtaggcaaatgctgtggagcagaactggatcacactgaaaaggtaaaacaactgaactttcagcaatgttatcacaccatgacattatcatgacagcatcacagtttttcactatgtatagaacatgacttggtacatttccataacaacttcctcagatactaataataccattgacacaactaattgaaccatttaaaaaaaaaaggacctaattgaacctgtaaataataagaggactaaattaaacctaaaaaataaatcagaggaccaaaaaaataattaaacctaaaatttatcatgttccaaaataaatacttaacataaatgttgaatcacaacggcagccatcttaaaagtaaactactacacataatatccatttggaaatgtctaatacaggctacactaacctaatggaacaaagaagaataagccccacattgaacagaaaagagttcatgagtgtcgctccccacctgccatagataagcgcaaatagtgagtaatcaatagaagcagtatgtgaccattgcaaattaaaaagcaatatgaatgatagatagtcatagattgcaaagtttaattacttcatgggatgtatagtaataaaaactagtctcagcccaagcatcatggctccagcaatcacagcaaggagaaggtagaagcagaaaaatgaaaatgcagctgtacccagaagacctgaaagaagaatgcatacatcatgaagaataactgaatgaaaattaaaatatataatgtctccatactctctagcttatggtaatggaataatcacgaaaggtaagagtaatccaacataccccagatatcatccagcttgatgaaaacttcattcaagaaaggagaaagaggaggatcaattaatagatagataatgatatgagcaacccatgccacagaaacgataaacctggcacaattttcaaaacttaggttagataatacatgggacgagagacacaacacctgttatagaataagcaatgctcattacagtgagatatagtaagagtaatgtcccagcaatagttatgcagctgtattcattgccccatcaaaggggtgtctattgccaatcttgttactcttgtatccaattcaactaattcatatctattttatcaatatcattattttctcctagttaaattaattttctattaccacacctagttttacttaaactacttatcagtaatttcattcattaatttttaaattcttctatcaattaataatgaaaagaaaccattaaaactatccatctatatgaaatgtatcaggagacagaaccatttgaaaattatcatacatacagttcagtttaagaaatccgcccaacagtaataaataacccattcgatgaaggaagaaaatctgtaaaactatgcattatgtataaggggtcatacagcatccagcattccaagcaactcagattgttacgtcattgcttaccctaatattcccaaaacgaattttgccagataccctagaactgttagtgcccatgttgtctcagcctgcattcatacaagatcaataagtgggaaaaccattgcatattgatattgtttacgccaagcaatcaagtatctaccttttccccttgtggatacatctcctcaagaagcttgacatcttcttctaattgaaacaactcctggcaaattaagtgagatagatgagtaaaaaaaaccagaaccactcaaactagaacaagaacatttcactaatcattaactgtagacaactttcacccacgactacatcagcacacatcaaattacgatatgcaagcccatgtgaacacaaaatacttgaaataaacttttgcattttgcattataaagtactgataaatcaccaatattgttttaccttttctactgatttcacatttttacgaaatttcctacccttcgaaccacttctttcttcctgatgaagtgactcagctgctttcttcagttcttttgcttttttacccagttcagttgcttcctgcaaccataaccaaccaaccacaccataaacataatacagcatattcaatcaatatttaatatgtctcctgctataaaagcatatagcaccttgatatactgtgaacgagtgataacagcctttggacgtcgaatgaatgaaaatataagtcccaatggaagacaagcaataccaacaccaccaaatatctggattgaatggaaagaaaacaattgttagtatcactaatatgaaaaataaaagtaattgtgacctgggattgaagactttagaaagtcataacaagtaattgcttctgcttttgtgcagtttttgggatcagccaatcagttgatattttttagggagtcaaaaagatccaacacaatatcctaattcacacaaactttcacaaggaaaaaaaatgatagttgaaagaaagtcgtacagataaatccataaactacctaggcagcatacgatataggattaacttacagcaaaaagcacagatccaacaatagtggcaagagcaacaatatattctggaaaggtagtacgcatggtccatgttttctctgatgaaggactggcagtgaatgcagaacactgatttaggacaaaggtaaaaaaaaaaaacagaatgagaaacagcaaaaaattaaaaatataatacttctaagagcaacaaaactggcaaaaaaaaatatggactgttggtgagagagagagagagaaacacacagacctgatgtgtgtttccaatacattgttgaccactattgaagtcccatgtgctaggaaattggcttgtggaagaagagagatgcctaacagtaaagtccaccttcccaataagtcctaaaacatcagcagacacaggttaatgttcacatcaaggcatcaagcaaaagtggatttaaaatgttgactcaattgtgggtggttagcattgaacaatcagattttacacttagtaacaaattttccatttaagaagtataattaggaatttaggaaagattagaatgaagtaaaatttaagatggtgatacttggtgcataggcgaagttaataccttgcaagttgcaaccttatacttatggattttggagaatcaagatggtcttatatgcataacacacacctttatgaaagagcactttgggcttgaaacacagatacaagacaagccaatgttaccttgttgaaattttatttaattatgatttatgaagaatgggggcagcgataatcaaattgctgcccacttaatcatagtgactcagaaaacatgtcaaggaccaattctaaaagcttaaactgttaggtggaggctccaaaagtttatatctcccacacaatctctaggatgaaggccaggaatggctctgaatttctaacacacagaaaaagtctcttcagtttcacttatttccaacaaaattaggcaacatgatgcttcaataaaagaactggaccagatcaggtgaaatggttgcaaatcaagcaattcgggaaagaaccacagtaacacatcattcagaaatcaatctcaaataactgacaaggcattgatagtgatacaatctcagaattgtatcttcaattattcaaatcacacaaggtaaaatttctgaataacacgcactcctatattaatgtctggtatatttgtacaaagactttcaaagaataaggaatgacaagtattccttttctccagagaccactgtctctatcccacagctaacacccaattatttttttccgcccttttactcaacccccctattcttatttataacccataccccttacaaaatttcccccaactaacagattcctaactaccctctcttttctatttcttgttatctctccttacatagactttccattccctcttattctgattattctctactgctatctgctggtctgtatcaatacctcctcccttaaaaacaaacttgtcctcaagtttaaaatccggaaattgactctgaattgtgtcatattcttcccaagttgcctcttcctttgtttgtccttgccatttaaccagtacctgatgtacttcttcattctcctgttttacctatctgtctcctaacaccttttctggatagtagagtggtaaatcaatgcttaagtcttcaggcaaactaggctctaccagatgatcacccttagccaattttaactgagaggcatgaaaaacaggatgtattctggcttgtggaggtaatttcaatttgaaagctactgccccaacttgttttaatattaaatatggaccataatacctagcagccaacttaggactcaaatttctaaccattccctgtttacgatgtggtctaatcttgagatacacataatctccttccttcatcgtgtgagtcttcctatgaatatttgccctttttttcattacctcttgagccctctgtaaatgatattttaactgttttaatgcttcatccctgttcatcaagtcttgcgctactgcctctaccaatgtctctcctggtatgtaccttgaaattgaaggaggaggtctgccatatactatttcaaaaggtgtacattgtgcagctgagtgataactagtgttataccaatattctgcccaagccaaatattctccccactgcttcggctgttctgaacagaaacacctcaaatatacctccaaggttctgttgattacctcagtttgaccatccgattccggatgataggctgtactaaacttcaaaatggtcccttgtaatttaaaaatttctttccaaaaattgctccaaaatataggatccctatcacttactatagatactggaatgccatgtaatctaacaacctctttcaccatcacttcagctatggttctagctgtaaaaggatgttttaacattatgaaatgagcatatttacagaacttgaccagatcaggtgaaatggttgcaaatcaagcaattcgggaaagaaccacagtaacaaatcattcagaaatcaatctcaaataactgacaaggcattgatagtgatacaatctcagaattgtatcttcaattattaaaatcacacaaggtaaaatttctgaataacacgcactcctatattaatgtcgggtatatgtgtacaaagactttcaaagaatgaggaatgacaagtattccttttctccagagaccactgtctctatcccacagctaatacccaattattttttttccgcccttttactcaacccccctattcttatttataaccataccacttacaaaatttccaccaactaacagattcctaactacctctcttttctatttctttttatctctccttacatatactttccattccctcttaatctgattattctctactgctatctgctggtctgtatcagatagggattttacatcttgtattgcaggccatcaactgtctctaaaaactaaaatgcaataaattctgcaactcatcttatcttgctatttacatatttgagggtgttgactcaactcccagtatttcatttgtctgttacaagtttatttgaccttaaacatatgagcagcttaagtatttctttgggccttttatatatacacaacatatatccgactatccgtccaagtctcaactattttaggaactacaaaacacataacattttcactcacagactgaaatatttcctagtgttcacaatgcactaatattgctacaaaagtgcaacccaacctattctaggttaaaaccctacctttttgctaccatcaatccacatcaagcgacttatttttcttagcatataatccttgaacatggctttataatctcacccccaccatcccaagaacaaactaacaaacatcactaaaccccactgttttactttttccttaatgtggaagttattacgagatggattcatggtatttagcttcacatccaaagcaagtagtaccacaaccaatggattcctatgcctaccaagtaccaagtgatcaccagcatgaaactatcaaaatcctctcacaatatttcaactctgccaattccactctctagttccaaattttcatcccactgctcaaacacactaaccaccatcccaaaacaacatgcaaaataatctatggacacccaacactcaatgacacttagagagaaaaatgtaaatatgataggtgatatgatatgaagatcaaaacagaaataataggtattgacaggaagtatgatatataagagtggctatatatcaatactcatacaacattattccgttcagtctcacataactctcactaatccaaacaaatccacccacccaacaccattaaccaaatccatacactacaccctcaaatcacacacagcaaaattaccaccttacccccacctcacacacaaacacaaagcaaaacaacaaagaaagtacaactgaaagtagaaaataaaacaaaaacaaccaacaagaccaacagaaacgtaccatacaaaatccccaaaacaagagcgcacacaatggcagtggtcaccatccacaacaaggcgcttttaattcgcttcccaacactcctgcacattcccaaaatcacaacaattttcaatttcagtatttttattttgttatcatgttattagcacagattaaccatcggctttgccactaactaatctccatcattgaacctggctgaccacctttgatgaggactccactcccaatcacgtttttccatctcaaatctgatatcttgcttaaggggtccaagcccagtaccactcggaccaacgtctggttggttcaatttcagtatctaataatcacaaattttaaaaatcaaattaaaaagcaccacatgcacttacttgtcctggtcgccctcgtagtagaacatggcgaaagggatgacgaagaagacgaggacggcgtcgaggatgtaaattgcgagccagaggtccttcatggggagcgtgaggctgcaggcgccgttgtagatggcatggcggcaggcctgacggttggcgacgtcggcggggagcatgaggatggagatggcagcgatggagaggcctaggacgacgacgaatttggggaagtaggcctggttgacgtcgtcggggtgctggaagttgacgaggaggtagacgttgaagaggaacacgatgacgcacaccacgatcgccacgatcaccagcgccaggttgaagtcccccattgttggtgggagaaattagggttagggcttaatcggatctgaatgggggattgggtaagaagagaagaaaggtttttggttggctggttggttccgttgttggggttggggttgggaatgtggaattaccgtttagcccttgtggcatggaagtttgttttgtttgtttgttggttagttggttgggtgtgagctgtgagaagagaagagaagcagtttccaaagatgttcagagcaggaccaggctgtactatagtagtaagtcgaggttgaatttgaatgaatgcttatgatgcgccgggtgttttgcactgatgttttctttcttttttataaaaaaaatataaaattggttggttttttgttgaaggatgtgacgtaagcgtccaaggataaggagccgtatagatttttgacgcatttaaaaaaaataaattaattattatttggagataaatttttaaaaaattattaaataaaataagtcataataggtgatattaagtaataatatttattatcctttttcctgaagtcataattttatttatgacttttaaatatatttataaactctgactttttttttactttttttatatgactttaaagtagtaagctaatttacctttttgctttttttttcttcctttttgccttatttttgtgttttttttttacttttttattacaacttttaagttgtacgacctttaaaaaaaatgcacttcatttgtttgtttcttaaaaataatttactatttatttattgttttgttttaaatttcatttaagttttttaaaaattataaaaattagtttaatttaattatttaaaaatgcaagtaatttaaaatttttgtaacttcttttaatattttgtatgtatttttatatcattttaattaaatattttagtaatttatgttatttaaaaatatttttttatatttatttactaaaatatttaaataaaatgatataaaaaatacatacaaaatattaaatgggattacttcaattttaaataattaaattaaattaatttttaaaaaaacttaaatgaaatttaaaaaaacaatcaatatatagtaaatttaaaaaaaaaaacaaatgaagtaccaaagttaaaaaaatcataagtagtccaaaaaaaagtaaaaaaaaaacaaaaggttcataagtcgtaagttaacttacaacttcaaagtcgtataaaaaagtaaaaaaaaaataaacaagttagaagtaataaatatatgtacgacttaaaagttgtaaataaacttatgatttcagtaaaacaaagtgaaaaaaatagatgtcgtaacagttgttacgacttttgaatcaaaagtcatgtaacctattacgagctacctccatttgaaaaatttttaaacacttacccccaaatggtaattaatttgtttttgccccccgtttgtcaaaaagtcgagccgtagatgcactttggaaaccactggcaaataataacaggttggaacttggaagttcgatggcaaacgaaagtgaaaataacttttatttttacttttttttggcttaatattaaatttggttctttaatttattaaaagtgttcgactaggttttttatttttttaatatgcaattatgtctcttagttttctttcgaatattagggtaggaaaggcaaaaatattcctagccattcataagtttgtgagaatcatttgaaaacgttttatacctattaagtgttttttaatcaaatattgggatttatcttctttctctttattattttttaggtaaataatcattttcgtctttgaatgtataaagcgttgacaaattcgtccccaaaagatgaaaattcaaattttagtttctgaaagttaaatatgtacgacaaattcattcatccgttaccttatgtttgttaccgttaatgaaagaccttatgtgacacaataaagaacgaatttgtcagcgttttacacattcagagacgaaaattgtatatttatctaaaatacaatttaatctttatcttttcccttttttaatcgttgcaagcataacattaatataaacatttaaaaattaggaatacaagcatgagttagaacaaacataataataagcataatactgattaataagcataatatgtctattgctctgaaatttctaatgtaacagtatcttatccaaaatatgagacttaaacaaaaatgtacagccattaagttaaaccttacaaaaaaatgatactcaacttggttctgtcactacctaatgttgtcacaataaaaatttcagaataatagatagattatgcttattaatcaatattatgcttattattatgtttgttctaacttatgtttgttttcctattttttttaagtgttattgtaatgttatgtttgcaactattaaaaaggaggagatggagagtaaattatattttagataaatagtcattttcatccatgaatgtgtagaccgttaacaaatccgtccctgaatgtgtcacgtaggctctttcattaacaataacaaatgtaagttgatgaatgaatgaatttatcgcattttttttcactttcagagactaaaatttgaatttttatctttcgaggacgaatttttcaacgctttacatattcattgacaaaaatgactatttacgctttttttccttttttctacctttcctggtttatccttttgtccccatctcccccacccatctacggtaacaaggtcacgttgtgacgactacaactacctatgacaacatcaaacgaagctctctcttcgacaagcacacactacaacgtaaaacaaaattcgacagtcatccccttgatcccatctcccttttttcctattctggatatttggaatgggctgaattacaatgggcccaacaggacttggtcaaagaatgttgttgaggcagttataatagtaaagagatcgtgaaaaccgttcaaggccatgatagccagtcttcctggattctcagtaagtttagtgtatgcggttaacttttgggttctcagggtaatgtcctataaatacaagcctcctccttggagaaaggtacacacattctgactctctcttttccatacacacagtgcacacaccccacgtccatttgtggtttcgtgtccattgtgatcttctttcctgaaatgttttgttccaccataaaaattctcagagagagagagtttgatcccacatcaattacccaacaatccttgttggacatctatgttcaccacgaatagaacacttccgtgttatcatttccttattcctaatcccacaactaggatcacgatcgtgaaacaccaccaccaccatgcattgccacccatcacaaatctaaacatagaaaaaaaggccaaattacaaatttttcatatttataaacaacatcaagaatgcaaaacaaaaagaaaaattcttaatcaagccttgattaaactcaaatctaaatacatttccttcatgaaatgaaaataaagtacaatgttagatataaaaaaaaattattaacaaaacaaagagacaagccttaataaaaagtaaaaaaatcttagatctgtcgctgaggtcaaagttgcactgaaaaataacagagaggaagaacaagaagacaactagaggagcttctcaggtcaacatggtcaagatgctattgtgagataaaacttcttagcacacaagatgataggacgaataggtggtgacacaagaatgatttaatcgaagagcttgttgtcaacaacgattgtaagatgggcgagcgtggcatggatgacctcgagatggaggatgtgacaatgggaaaacactaaaccaaatagaagggtaatatctgaaaagtgaaaaataagaaaaaagaaaagcaaaaaacagagttgcactcgatgggcaaccaattttcttctgcaccctagtctttgtctagttttctaattttacccaattggatccttcctatcaggttcattaactagatggaccaaaatatcatatgtggcacctaggagtattttttattttgtatacatatagtggcgatttttagtcttcactatatttattaactattttgaaaaaataagataaaactttgagaatgaaatttcctaacagttatggattgttgaagcaacatttcaaggtggaaaccctatcgcaacactcattgtcgaagttggctctgattggaatccacaacaaggtcataaacgaggtataggtgaataaagtggggttgaaaggcattgagaacgtcaccaatgtatgtaaattactcgtaaatgatctaaaccacactcgtctgatcttgacgacaacaccgtcttagttcagtttttgctcccacaaacatgcttcacttagatctgatgcccattgtgtgttcgatgaaaaatcttttccactcttccacccatctcacccacaacaacctcatacactcagatttgatgacttcccagatgatgtttttgtctcacggtggtcgacaatgatgacgttgtgaccaaaacctatctcacccacaaccacaacttcaacccatctcaccccacaaccaccgctccgcaccgcacttgaaacccatcttagatatggctcacatgctcatatctaatagcatacattgatgtgatatgaaaatgcatttcatgtggttgatttgggtgttcctacatttttttttgtttctaattccttcattttgtttgtttgatccccatttgttttgcaatgcatgtggctaattagggtgtggttggtttgggtataatggagcggtgaggatgataagagttttgctgggattttccaaaataattataaacatagtgacaattaaccactatatgtacacatcatagacaaaacaaaaaaaattatctccaagtgccacatttgacatttttgttagtctacttaaaaaactaaaaagaaaggactcgattaggtaaaattagaaaactaagggacttaattgcataattgaaaaactaagggaccaaactgagtattaagcctactttttttactaggttaaattgcaattttgattttcattgagtgtgcaaaagtgtgataaattagtacaacagacaaattaatgacaaattgattcttaaattttgcggcaagaccaatctattgcaccacattcatagactaatttgttattgccttacacttcaaggaccaaaatgggtatttgcccaaaataaaattaagataaatgctcactttagtccttacattttgcaagcgccaacaattttgtcgttgttctatggaaatgatcaatttaatccataaatgtgcaaatatactaacgatttaacccgaccatcaaattatttgtgttttcgttaacattttttgcaatgtggcacgtgaaggacgatgtaccaaatccacatggcagaggtgatctccatgtgctggccaagtatatgtggaccaaattgtcagttctatccttttgtttttacctctaaaagtcaccacacaaagtgactattcatctatttgcttcattttttacctttgtgagagagaggctgagtacatccttgctaagtatgctccttcccaccctttgcattactagtggctaacagcaggccattttgcatacattttctatgggtcattgatgacaacggttcattgattgatgttccatttttttctttttcttttatttgttctatttgtttgttttgctaattaatgtcatagatttgtttggtttctttgttgtactttttctaaatctttattgtctccaagtgcataaattgatttggactttagaggattggaaattatgttgttaagagatttgttgattttaagttaataatcttaattcataaattaggggtttaaaattttgaattgattaatatttggattcagaatgaaattgaagaaaaagatttctctcattgaatgtgtgtttttaaattcacataattatcgtgaactattttgtcaataagttatatttgttaaattgcataagaacatattaacacgaaattttaaagaactattttcttctccaaatacacattatcttcgtaaatttaaaaatcaacattttaaaaagttttcctgataatttagttcaaatgctatatattggttaatgtggaacatcccttgtactcatagatttgtcatgtaaaaatcaacatgtcaaatatgtagacatgtcaaaacaagctcaacccattttggctcgcccaaattggtggattgggttattaaaaagctggctcaccaagattttgggtcatttggacccgacccacttaacccgtaacccacccaggttgaacctgggtgagccgggttggctcacgggttatttaaaaaaaaagaaaagaagcgtgagtgaagcacacgtgacacgactgcacaagtgaaattgaaacacaaagtcacaaacacacacaccttaacctaacctaattacacaaagtcacacctcaaaaaattgaaacaaaagctgcctgtagtgcttcttccgcttccggcttccgcagctccgccgtcgctggttcttcacttctgccgcagttggttcttcacttctgctgctggttcttcattttctaaattctaatttgtattacttaggtgggtaaaagggggaaaggcagtagtaaacctcattctctctttttgctactccacatttcatttcatctctaattgtgctattgctaggctgtcttcaatatttatttgcttgatcaaaatagttgggcatgcatattatttttcttttctcttggcccaattaaagatgcaattctcattgtgaacacaacataattattattcttattatttttgtatagcttgtatgcaagaatgacttgtccatccaatacaaccgtgattgtatgcttcagcatgtatttatgcaagcttcccacatggaaattattcttattatttagaacacactgtccatagttatttttcctgtgtctgagatatttttccacatgtataacctgtatgtaataatattttttgggttttattttttaaatttaaagttagccaactcgcaagtcaactcacgagccagctcgcgagccaacttggataacccatcaacccaggtgggttgagccgggttgacagaaaactgaccatcactaaagtaaacaaactcggtccgactcattttttagacaacccgtggtgggccgggttgacccattttgacaagtctacaaatatgcactcaatggtaacaaaaataaaaataatttgacaatcaagctaaattgtctatgcatttatatatttgtgaattaaattaattattttcataatatatataaggacttatctgtcagcatccgcaaaacacaaggagtaaagtggacatttattcataaaattaaggaaacacgcgagcaattcagtttctattttttattttttcaaaatagtgaaaaagacgaaaagagctattttggggtcacacacggagtcgtggctaaacacgccgccgcgcctgcgcattgccatttgccagggccatgcccaaaattccaaaacgaaatcaaatcactattaacagaagaacagtgcttaaacagccattgccgttcacctgctattcgattttctatcactcatcgtcactaacaaatggatatagctatcttctccccatcatccctcttctctgaagatgacattcctactagtagtctctctctctctctctctctctctctctctctaccttcatagccttttctatgttttgagacaatttgggtttctgaatgcaggcgaggaagatgcagactctcaagaaagctatgttgagaggaagcaccagtttcctgggatggtaaggtttccttctttaatatcatcattggctgcttaagcaagttcatcatgtgggttttaattggggcatgatttgaaggcttttggctaaagtattgtgcgctttaggaagctgaatttgctattgagattttttttattgggttggttgctatgagagtcttggtgctggagcagctgtgagctttgtaatggtgctgaggtagtgttgtctcatgggaatgctgtgtggtttgtgatggaaaggtcaatatttgaccgaagtgcttaactgtttggaaaaggaaaatgttgaaagcttagggtcttagaaacaaattatatcttttaggaagatcttagtgttatgcgattttttgggcaacctacgtattgtttcagaaagattgggtgtgcttgtttgggatgaaaacaagagaagtaaggattaatatttacttggtttattgtttagggggagtcaggcctggtgtgtaagttgaattgactctttatggttaaaaaccttcttgagtttggtttgacaagtttaattacgtgcagaaaatagaaatttgatatgatttcgtgtgaagctaatcgtttagttattttttattgacacatattcagtagatgcatttatctggttgtttatgtggatgatatatatatatatatatatatatagtcattagttattacatacgatgatcacaagggaatatttgaattgaagaattatttgttttgcactttcaaaccaaagacctaggaaaactaaaatacatccttggtcttgaggtggcttagtcaaggaatggcattgcgattgtaaaaatgatttgctttggatatattggagtgaacttgcatgataaattgtaaaccaactaatactcccaatggatcctcttattcagtagatccaaacagcaaatttttgatggatcagagggaagacaggtataggaagtgggttgggagttgggacctttgaagctaaactatcatacaagatccagcccatatatatatatatatatatatatatacacacacacacatacatatattgcacttagtgtggtgatttcgtgctatcaccttgggggtgtttgtttcatggataatttttttttattcccaggaatatgaggttgggaaaatttagtcccatgcttgttatgaggtaataaaataattattgttggatatacaacatatttttttaaaatacttgggaataacattcccagcattaaagaaataattcatgaaactaacaccccccttgtgttaatcacaggaatactgtgatccaaaatttatgatacattaatattgctttggatcaaaggatgttttatgaagacaaaggaaacatgtcgtggggtattcagacccagactgggttagtttccccattgataggtgatctacagtctactacataggatagcttttgtgatttagttctctaaggtctgtataaagttcaccccaatgtttcttgctggttaatgtttcactgcaatgagtgggcctaaatattaaatcaaatgatttgacatggtattaaatttcagtttatctttactgtactttgtgtgtttgcctgtctatttatgctgagccaatagcttttgttgtttctgatgagatggttattttggcaatcatattttttgatgctagacatgctagttttatgttagttccctttataggacttaaatcctttccaaacttactaattatgtccatgtttgaggtttcgtggcattaacttgtattgtactggtctgagttgctagatgccatcttttgtgcaggagttggtcatccgagaattttcctttcatcaactgaatgctaatttactctggccaggggcatttgcatttgcagaatggttagttcagcacaggtcatgcattgaaggacggcgtgccattgagttggggaggtatataaattacttgtacattaatttatgtctaagctatagttattattacttaattgcatccagctacacatctatcaataatcgctgttggttgtacatttcgtttctgagacaagcatacttaactgtatttcttatgaaaatgtatcaccatgtcttttgctctcacattttagacaattgatttcttttttgcttttctcatgttgcatccaatttcagtggcacaggtgctttggccatatttattcgaaaatcttacaatcttgatattacaacttcagactatgatgaccaagaaatagagaagaacattgctcacaactgcatggcaaatgaaatacctatcatttctcacataaaacgtgagtcttctttcaattgacctagctgtcttttgctttttagtaagctattgagaagggtttaaaagtggagattctgtgttttctggctggttaagtatcctttatgattgtactttaaaatctttatgccataaaacaattttatatttgagccttattgttgcttagttaacaaaccttgcttcctttgagtgattttatctgcttgctaccagtattactctctagagctcaaagatatattgtctttgccaagttagcctctttgaaactcattccttcttcccgtctacttttgagtgcatcatgacattcatgctatgctcccagtcccagttgctcactcttctattcaggctgctcagcatctatctcacctcctttcttgctcatatatcaatgagacaatgacaatcacatcccaaacctgttgatggacccatagacctagttgattagccaagtctccctgttaccaattcagttcccagacttcattctcatcttagtgaaaatctcctgctccacctcctgcaccaaaactgactagaactgactatagcattacaaaatatcaagtctacttatagacctctaactttgtctgtcatttgaattatcaccatttatctcctttttaatatctgtatttctttgcttagctcgtgacaaaacaactattggttgtcatgggtcgatactatcagtatgggcaccaatgggaaagttgactgttaatggccaaaggattttagcaaatattcaatcatgactttttcaccaaggggaagcttgcttttattcgcctcttcttgtcacgactgctcttcatcagtggccctattgtttgttagacattaaaaatgcctttttatatggtgacttacatgaaaatgtttacatgcaatagccccttttttttctatgcacagattgcacttggcttagtctgccacctgcggcactctctcttttgcctaaaacaatcggccattcttggtttggaagactcaattcactcacttgtcttggttttttgtctgttagaaaatatgtaattaatgtctaggactctaggttcatttataggctaacaaaatcatgttattacatcaagaagggtaactttaatctttggacttatcttttagtctatataatttagatctactgtgtagtttagacacggaatttatgatatctcttgtgacatatctgctaacttgaggggggtgttaaaaacatgcatgagttgttagaaataagcacatgtacaatgagtagtgttagctctgttactgacttgtaggtgattataaatttataattaatattgtacacaaattaaattaaattaaattaaatttatgcatatgtgactgattagtcgcaagtattcttcctctaattccacatcattttacgtgttctttgtattactattgattctataattaatttctcttctccaaatactaaacgtgcttgtatttcagacacctggggagacaagtttccaaattctgaccctgactgggacctgatcattgcaagtgatatcctattatgtaagattattattgtttactatattggttagccatttttttttttaaactgaacattagttcattgtaactaatccaatgtatccattaaggaatagcatgccattgttaatggtttgtaaagtaaaactactagtgtttcttgcagattgaaatgtatgaagatactagaagaattaaaaagctagttatcgtgttcccattggaatgcattagttctctgctgagttggtatcactttaagtggtgatggagaataacatcaaagtgactagcctagtttcattattcatttttttcaatgatttacgttgcaatgtccatctattttgagctctgtgacttggtggttgttgtttcttggaatgccaagatttgtaatttcaatctgagattgatctgatctgtgaaggattggtttgaaagtagtgaactagtactttgtccttttatttccagattctaattctcactaatactctgtttatcgttaaaagtaaaaaattatgcatttaaattattatacttgtttaatgaatattaaatatgtcatttaatttcatcatcttgaaatatttaattggatctatgaagattttggtctttaaccaaactgaatgacgtgtgatacatataacctcctcacctagtgtgatgaggattttgttgttgcaatatttaattgaatatagttttttgtttgtgaattgtaataaaatgattttttttgttaaattcaaggagtggatggtgtccggtcacggtcacatgtccacttgacaatgttctgggaaatgttttaatttgtgtttctgatctcttctcgtggatttctttcctcttgattgtcgttcctagagaaaaaagattattacatatacatgtagtccctaatatctctcaaatcttaaatgtttgtagatgtgaaacagtatgcaaatttgattcagaccatttcctttcttctcaaatgttacaagccgcgagagagaagagcagtttctccaactggaaatggtgagaatgatggtattgtgttatagatccattttaatcaacatgctttagctactcaagtttacatattttctgaatcttgtgctggcaggcgatgtagtgttgccgtggccagcctttttaatgagctggagacgtagaatcggaaaggaagatgaattgcttttcttcaatggttgtgagaaagccggtctaaaagtgaagcatattggatcccgtgtatattgcatcaattccatagaaaatgagatatcagaaacaaaaggttgattaataaaattagtattcaagcatgcatgggaggagaaagaagtgtaaactagaaggttggtccagttatagcttctatagagtaatttgcagctcctagatcctagttgataacaaactgttgttggtaccgtcttcttaagttattgatactaactttagtactttaccattaatttcaaatatcatgagatacagaatctttggacaaatcactcttttgcagtgacttgttttgctatgttgggtaagcattttcaattatttttaatttttttactagtgaaaaaacttgtttgatttcattaatgacatttggcaagtaattttttgggtaaaatatgttttttttttcctgaactttttcaaatttatggttttgatccctaaacttttcgaatactggtcaacatcctcctacttttttttttggtcatagcttttagtcctttttgtctatggcaggatccaagctctgagctgattcacaaatcacttttatcaccttttatgttttaaaagattggtattcaataatgatacgtaatactttttttgtctagatcatctatgctagtaatatttttttttgtctatatcaatttcgaatccgttgttcatgttggatccggataagattattatgaatgacaatttttttctcccaggtgggtacactagaacaattaatcctatggacaacaaagtgattgaatggattattatatataaagtgggatgctgaaattaattgattataaaactttaattaatgactttcttgtccaaaaagttagaaatcaaattcattatattaaactagaacttaagtataaaatttatctaaggtcccaaatattctagcacaactttggtattacgccttgtttataagttagttgttacatgtttatattctcaaaatacatttggtcttcaaaaataggtttgaggccaataacccaatggaatgtgcggtggatcttggttgcttttgatgagtgactttgatggtgatacttgtagagattctgacgttcaagttagagtgtgtatggaaaagtagtaaaaatgagttaaagccaaaacctgagtagagttcttatacataggcacatttggtgaaaaaacttgttaagttcgttatgtgtggcaacacgtgatcatatgcaagtatccgattacttaagtgtaattactcttaggacctgtttggataagtttctttagaaacacttctagaagaagagaatatgaagaaaaaatatgatatgggcttttccataactaaaaataagttcttcattaattaatttttagaagctcaccaatatagtttctctaaaagatgagatgacatctataaattaattaataaaatacttattttaacttatgaagaagcttattttattttttttctccttatttttctcttttaaaagtgcttttaaagaaactaacattcaaacatacctttattctggtattttcgggttaaggctagatgtcgatttaagctattaaactcgatgtcctttgaagcggtttgccttttagcccagattaaatagaaagagctgaggtgatctccatattaattagttgccctaattctgtattacttagaataaacattgtttacttaaggattaaggcagatatttcctccaagtcagttgtccctaagtcagtattacttagaacaaccaatgctgatttaagaatattaaagcaaatatttattccataatagttgctcccaagtcattactgtttagaataagcaatgctgacttaagaattaaagcaaatattacctccataatagttatcaataaaattacatggtgacccaaaaaatattgagcatatttcacaaccaggcgcttcaataatcactgtacttccaatttatgcatgtaagagcatttctaatttcttaagccactcaacgatatacggatcatttagaacatgccagaagaaaaaagaggggaacaagttatttgtagagattgaattggcatggccagtgagacaagttatagatcaagatatatctttgaatggaaaggaggaagcttcacagtagctgcaaaggtgttcagaaacagatgtacgtgggagcatgctatcgtttgcaggtgaaaactagttactgtggctgttgggtgggttgaagctaggatgagggttatataaacgaagcagatagggataggagtgcattcattaattttccaggtaatgtgtttttggagggaaagtgataatttggtaagtgtgaagctgaaatatattagcctattcaaaaaatttctttagtggaggcaaaaacatagtctataatatttttagacgaaaaatattataaacttttataaaatacataatttcaaattcaaagaattggttcaattttcacgtgaaaaatttccttagaccaaagacagtcaagtaggattagcttctgactcagactcaatggtttagggaatatccttaatgtcttacctaaaaaaatacataaattcataatataaaacaactcaaaatatcttagattttatgaaattaaaaggataaaatgaataaaattagtaccaatgtattttctattttctctttttaaattttttacatcctttttctttaaaaaatattttatgagagtaatatctattttttttataggtgtaaaaataataataatttaatatattcatgtaaacaattaccccataactatgtatgtgcatccgtccctgcctgcgttgataaggacacagcaacaaattaaaggatactgatgttatttgtttctgattagcatgtgaacctctgaagactttgccaacttcattatgaagaaatggacagaatagatcaatgcaccaaaatagtaggacattgtgtctaagttgtcacctggcgatggcttcattttcatgggatgaaaatgaaatttctggtgggatattttcaaatgaattatatatgtagcctagcttttaatggaaaatttttgtcaacgcaattggtagaagaaaaaagaaaaagaggatgacaaagctaaggatataaattacttgcttttaagaggtgaataaaacattttttaaaaccctccatggtatgttgttgaaagatatttatatgattgttagagaattgggttaataatgctttggatattatagatgaattacatctggtcttgtgtgtatactgagttaaatcactaaatatatgaaattgtccttattctatataattccctgtgtcgtggtaaattattattcctggacctttcgtgtgaatcttcatgactatattttgttgttacctgtacacatatatacaatgcaactaaaaatatgatgaagccattccttgattcatgcgtctcgagttgattatgtattgaatttgccttgcattgaagttttgcttactttaatagcttatatgtatatgttttgggtttgttatccacacacacacacacacacacacacacatatatatatatatatatatatatatatatatatatatactgttatcactatgatattgagaattttatatgagatagtttcatttgggacaggataagatttattatagatacatttacttggaatggggagagattctcgatatttttatttatgatgagaaaaataatgagatatcattgcatgaatataaactcattgacattttaaagaatttgagatctaagattcatattaactttagaaatcaaagagttaagtttactgattccaaaagtcatagacttgtacaagtctatttgtgatgtttatttgaatgcaatgagatgttgagatttattaatacttttatttgttgagtatgttatgagaataaagtatgattgtctttaatttgatttttattgggatatatatatataacattttattttaaatttattgtggatatgatggttgatttttttgattcccacgtcaattgagaaccacattatttgtgaactcctttttagttgttttatttactaggattacatatctttattagtgttgtttttagggtagggaagaagttaggatacttaaagacataatttcttagttacatttttttttttagtttggtcagtatttcatataaaatgctgggttactttcatttatatttgtagcatttatttaatttagatgcatgtccatgttttgaggattatgttttctttttacaaaaatatactcatttatttgacttatgtttatttaatttaaatgtccatgttttccttttgcaaagactggtttatttgatttattttattatacatgagatatttttaggctatatattataattttggaacctacatattcctttttgaaattttatcatgatttattattgtaacgaatggtgttatacttcccatgttttggtcaaggaagggactaggtggaggtatcacaaggtaaatgttggaactaaaattagtgactttttaaacttgaggaaataaatgtttattttaaaataaaaggacaaaattacatattgtaaaaaaggggagaaccaaattgtattttaacttataagttaagtggattaggctcctataaattaaagtcataggaatacactttagaggataaaaatcaataataaccattagttaaaaatcaaccattaatattataattaactaaaaattttataaatcaagaaagtctaattgaattgattaaataatctaaataagttattaataactcttttgatatttgaatttgatgcttctgaatgaaaataaaatttgttaaatatttgaagttgatttgctaatcaacgattgatgtaagtgcattttatcctctaattttagagaagcctcccagttttataacttttttgttgactaaaaaaataatgttaattagtagtcttatatataatatcaataaaattttcagcaatttcatgatgaagttgccgttgattttcaaacaattaaaatcaagaaacgaagttgccgtatactttcataaaatgaaaaataaagatgccgttggcctagatcgggtatttaaagaaatggaagaaacttacattcaactagtactgattaggtgcatgcggggaaacatccttctgtaatcaattacttatttatttattgaaaaattattctgctattatttatgaaaaaatgattacgaaactctaacagcatactattaagctattatttgataaaattaatcgctagtggcaactgaacctacttgttaatagctcaaacaacgcaaaagatcacctgaccttgaattcttcaacgcgttctactgtaccgtgccagatattaatcaaacgatttaattgtattgtctttatactaataatttttttatctaataattaaacacaatatcaaaaatttaccacactcttacacccttaaatagaagctcgtatgataatcatttaaatacacttatgtgttaatttggacagagaattttcaaaatatcaaagaatttgatcgtaatgcaagtaattcaattttgaaagcaattaaattttattcaattacaaaataacttgtttgaattattaattttgaatttattttcacataaatttaattttttattgattactgattttaaaaaagttttttacttctcttttctcacttctctctacaacagagcacgttcaaacagtgagtattgtagtagttgcagtgttgcaccaacaccactatattacaaaattccaccatggtgatttctggtccatgtggtgtttaagtttaggaagatgataaagagaggtttgctgataattttctctctttgttggtgatttgtttcaactcttttatgactgcgatttggattgcatggaggagagtgtggaaatgattgtcgacgggttgggactacggcggatatgattgttggtgggttggaattctggtgagaaaagtttgtcagacaaaagcaacgacagatgagcgattggaggagggatagagagaagaaaatacacatataggagaaaaacaaaataaaagtgtaatttaaaacagattaaaatttaagataattaatttttaacgcagatagtaaaaattttattaactatttcaaattcccaattttaattcagattaaaatttaagagaattgattctttaaattcttacttttaagtatccaaacaaaatattttattgaacagtaattgaaataccctatataattattttatccgcatgaaatgccatatccaaatacacagtaaaagtttagatgttagttagattatttttatgtattataagaaataattgatattggtatattttttttaactaatttaaactctagcttcatgtccgttgaatatacctataaaaagcgctccccttaaaactgattacctgcaagttccccaagacttggtgcttattacattctttcgctaagcctgccaataagtcactttggaaacctaaatgtgccaattcctttactgaatgataccaaccgaaacccccttaaatcttcctaattaagtcgcttgggaaacctaaacgagctagttcccaaaccaaaccataccaactgcaacccctgctaatcttcctaagggagtgagagatattaagatgggataaagatgcaagatactccatggtatttgacatcttgagagaaaagtaaatagtatagtgtgataagaaatgtgtatgtccgtctaaggaaaggccgaaactcactccaatcaaacgctgcaaatgccggtttgtcatcaggaagcaacaagccatattatgatgacgatgcatcatcgcaaaggtccatcagcattagtcatcatggtgggtcgttgcgatccgttgtgttaagccgtttttctacggatcatgactcatctagtcgtttttctattggtccttcctcctctagtccttttacaggacaagtggatgatgcgattcagagtgaaaaagcgtttagcagggcatcccaaagtaccattaggagtgaaagaacgtataggctttcagaatcccaacgtggctccaacaacgtgtctagctttggaggaaaggtgagtcatgcaattcgaagtgaaataccatcccaatactccaacagcagcagacctagctttggaggacaagtgagccatgcaattcggagtgaaaatccatccagatactccaacagtaccatacctagttttggagggcgagtgagtcaagcaattgggagtgaaaaaccatctcaatactccaacaacagcagacctagttttggaggtcaagtgagtcatgcaattcgaagtcaaaatgcatatacatccctatactcaaacaatacccctaaccctaaccctaaccaagacccagggcatcatatcattagggctaggactgcacctcttagacgatctcaaagttatggagggcatgcaaatcatgcaatatctcgtaggcaatctcaaagttccaacaacccaaatgatcaacgacgagtgactcgtaggaggaaaagtgaacaagctcatagcatgaagcaagatgctgcgtggcaatctcaaagctacgatgttccaaataaagaatggcaagtgggtcttaataataataataataattcaaacatgatgacattgtacaaaccaaacatgcctggtggttatgaatggtcaatgggtgataggatgaaaagtcagcaagcacatgctaaccctcataataatcttgtggcttcgttggctattgcattgaacaaccccaatcgcaatgtgcctagttatcaattaccagtgggttattgggtgcagaatggtcactggtcaaccagatggtaacctcaacagcctccttggtcgtggttctattatcaataatcaataataatatcaaatgattccttgtgcatggtgatcaaatcatacatcattaaatacaaaacccaatatctcaggtgcttggacaaattatatgaagaagatcgcttagcttaactgtagaaagagcacgaaaaattgagtgtttcttatcacaaccttcggactatccgccatcgaaaatcttcagttgttttagattctcatccacgtccattgccgcaagaataatgctgcttgtttgtattctttttctattgtttcctcgttttaaaatttccttttactttttttaaggacccgttttggaaatgcccattatcttgtgcacttgtttatcaaatagttaataaaattaaaataataaaatgtcaaacgcgtgtgtaagaacggtaactttatattactgcatgtgttaaatatttattattttgaattttaaaaaccacaatcttaaaattagttttttttttttgaaaaaaatcttaatattagctaacttttactcacttattgtgatatatcgatgaaagtttctaaaattcacaacactattgtttttaggcatgacagcggaatccgaatccgcagggaccggaccgaaccaaactcgtcctgattttgacggagaaaaaccgcgttgactgggttcgggttcgagttcggattttccccgttaagaaaaggcgagggcgggtatgggatcactggtatccgcctcgtactcgaacccgccccgccatacttaaatttacaaaaatgcccttatatatataaggagaaaaaagaaccctaagttaaccctctccctcactcatttctcagttctcacgtgacggctgggacactcacacagaagcttctctcacactcacggcactggcactggacgacattcacggatggggtgcattcacagcaggtaaccattgttatttaccttcctgtatttttttgggtcctatttcttcccgaatctttcacctccttttttcttttacgttcgtaatcagtaccatttgcctttggtttaatcattatttacagtataacacgagactctttagtgctttgatccgattgagttaacatttggagggtttcattttcatatttagttttttcaaaactgagagtacaatgttcacttttacatgctttttaggattgggggttttatagaattttattagtatacactgaaactatcatccatttataattagattgattatttttgtgataattactttgaaattcatgtctaggttgaaaaaacatgagaaatgaactcagattttatatttcttctgaagttaaattggattgagaagggtttttggggactggattgggtgttttactgtaaatttgaatttggttcataaaatttcgtgactttttaattgattttcaattggtcaatggtcactttatttaaaaaaccttttgtcaaattttactttttgataacttcgggaggagttttcttttattttttaagagaaaggactgatatgataatattcagtgcttttgagggatggaagtaaaaattttgcatttttttttcattagaagaacttgagaatttagtcttcttgttttttcttttgggtaattgtgtgattggttaatggttccaatgaggaggctacaaaggaagctttgttgtatagttacaagtctgcagcaagtgggttctctgctaagcttactccagagcaggttgaacagatttcaagtaagtttggttggttttcaatctaatttttattaatcattttcctccatttaaactccctgatttaatatggttcattacatcatctatgttattttatccttttggaattccttgatgtattgtggctcttttatcatgttgattgtttatgttgcatctaagcaagatttgtgtattggatgattctctcgtatcttctgtgtacttgggttttgatttacagtggtttatactatgattattgttataagattttattcaacgtttaaagatagctttaaaaaataaaaaataaaaatattaaccctgttggtttgggttgggtagttggatctttgactggttagaatcttgtgattttgacttaatgacttatttgtgatgttgcttagtgaggtgaagataaaagagcaagtgacatgcacctatggttttgcttaattttatgcagaatcagttttttaactaaatgctctcaatgcaccatttatattataaattttcagaacacaaaattaactgaatcaaactagtgcagcagtgtatgataataaaaattgaattaatgcagaaacattagtttgaagtttctgtggagttggttcctacaaatttatagtttctattttttaggtcatttcttgcccacgggttgcttatgattttgtctgttagtgaagcattttaatgtttgtagtaattgttgggaggggccgaaatatatatatatatatatatatatatatatatatatatatatatatatatatatgcaatctcacgtgaacattaacaccactctgagaggaagtttaaatttggagagaaatgatggtggataaaaaaggcatctagattaattcttataaacccgaatgctataaattaacttcaatatatctaaaaactgcaaggccatatatcatatacgtttctatatatacatatatgatcttcatccatacgtgaatatatatgcatagtttcgatgacttacaatattcttgtttgattgcttctaaagaaatggaagatcaacaaagtggacatgaagatacaactcctgctcctggttatactccttcacattctcctggtgttggttatactcctttaacttatgcttatcatgccccttcatccacacccaatgaatccattccgctacatgaagcagaatacatagctgataatttggaggggacaacgcaaacaggaacaagtagacttaaaagtgagatttggcagcattttaaaaaggataaagttaatggacaagacaaggcccaatgcaattattgttcaaaactgttgggaggaaaatcaaaaaatgaaacaacacacctatgggggcataaacaagtttgtgttcagtacaagattgcaactagagggagtacatggcaaacatttattgtttctaaggttaatcatggaaagcaagagttgggtacaggaacttatgatgcggataatgcaaggatagagcttgcaaatgcaattattatgcatgagtatccactatccattgtggaccatgttggttttaggagatactcagcagctttacaacctatctttcaagttccttgtagaaacacaattaaaaaagaaattttcagaatttatcaagaacaaagatcaataactttgaagttattagatagtcttcaaggaagagttgccatcacatcagacatgtggactgtgcaagcaatcaaaagaagggttatatggttgtgactgctcattatatagatgcctcttggaacttaaagagtcatattttgaggtatgttaaaaatttaatttttttatattattattgaattgttgcatgataaaattgttgaactatttatattttattttaggttcatttatgttcccgctcctcactcaagtgaaaagctttgtaatgtgttagttgagtgtttgatggattggaacattgatacaaagttgtccacaatcactctggataattgtagcacaaatgacaaaataattgataaaattaaagataagttgcacttaggaaatttattaagggatgggactttgcttcatatgcgttgttgtgcacatatattgaacttgattatgaaagatgggttagaaattgtgaaagatgggatagagaaaattagggatagtgtagcattttggacaaccacaccaaagaggaaagaaagatttgaggagaccgcgaaacaattaagaatcccgtgcactaagagtttggttttagattgtccaacaaggtggaactcaacttataaaatgcttcaaattgctatatcatacgaagttgtgtttacttggttgaaacaatgggagtcccaatatacttgtttgccaagttctccacaatggcaatttgctaaggatgtgtgtgggaagttgaaagtgtttaatgctgtaacagaaatattttctgcttctaaacaaccaacagctaacatgtatttttcaaagatttgtgagatcaacatggcaattaagcagtgggttacttctcctaatgaaatcattcaaaaaatggcagaaaagatgatgatcaaatttgataaatattgggctgtgattcatgaagaatgtgatgaattatgtgaatttgataagtatatttcaaggaaaaaaaaaggccaaaagttctcatgctaaaatagagttggatcattatttagaagaggaagttttaccaagatccactgattttaatattttgttgtggtggaagttgaatggtctcaagtatccaacacttcaagctattgcaaaggatatcttagctattcctgtctcaacagtagcttctgaatctgcttttagtaccggtggccagattttagatcctcatcgtagtcgacttcattggaccactttagaggcattgatgtgcactagaagttggttattgagtgctgaagctgatggtattgtcttgaatacttgagttagttatcctattaaatgattatttatttttaatcttaactaattatttacattatgttatacttgatacaggtattttgaaatctaaaattcttgcacaaagtaattctttgattgatgagataacttcagatgatgaaggtatataccatacaagaatgttaattttttaatgatgagtttctttatattataattttggtttatgatttaatggttaatccaggtgataatgcaagtgatatgatgagaagtggcattggtaaccacttggaggaatgaatactacatccaatttgaaatggtcaatgaagtttattatgtagaatattgaaactgtgtgaccatattttgtgtactagtcatggtggattaattttgtcttgtttatgtgagtataaacttcttatattggtgaaggaaggagtctatgtattattctatgatgttctttttcattgactatctagtctttttctttaaatgaattagatgagattctataatggtggctactagaagaaatgttgttgctgttattattttactgctatgttattttacagttatgttattttattttgttgctaaagataattttatcttgttgctaaagattaggctattagttgttaggagcctatctttaagttattgttcctcttctttttccaaaacgtgaatctgatcatccaaaagtctacacttctgaatctgatcatcacaagcattattatttcggctttaccaaggtgaagttgcagaaaacacaacacaccatatggttgaaagcattgctgagatgattgtggatatgtgtatatacttgtgttctgcttgttatacagaggtgacaggtgaagatttgcttggtgcactatgagacgaaactgaatactgattgagtccatgtgctagtgttttagacttagtgtggaagcatcttgcttcctgtaatattagttttccattgtaagttgcattcatagcgatttagtttctttctccctgtaagaaacttctcaagatgataagatctggcatactaaattctgtagtcgggtgcggggcgggggcggggaaaaccgaccccgggcgggggcgggctcaattttttagccccgtcggttttcaggggcgggggcagggacgggggtgggataggcaaaaatcgtccccgaccgcccccgttgccatgcctaattgttttatcgagtaatgatacacatacactatatgtttcaagcatctaattaacacttataattttttatctcttttttatgtcacatggtaatacttatttttttagtgctgatttttggacaccaataaatttcaaacacctatttgactatcttattttctcttcatcttttttttttctattaaattatatcacctatcatacatacacttctctctctttctctctcaaggtgtcaagtagttttggttatcaattttttttcttattttttataatacgaatgttttctctattttttttctctctcactaggtgtataataacatgtccatgaatacttttttttagatagtctaaaatataatttttcatctcataaaatacttaaagtttgtttttagtccaatggatttttttttatatttcatcctaagcaaaataaaaatttgtgacttttttggcttagaactaggattagattcatggtgaatccaagcactacaaggagaaggtgaaggcgtaccatgataagaagttgatcaatagggacttccatgctggtaacaagtcctcttgttccactcaagatcgaaactctttccttggaagctgaagttcaagtggtcagggttgttccttgttaaagaagtcaagccatatgggcaggagagctggtggatccatctgcagttgagctagtaaggggttgggtggtcaatggccagaggttgaagccctacctcggtggggagattaaaagattgaccactctcattcgtctcagggacccttgagtcctatcaaccatcaagctaatgacgttaaagaaaccttactgaaaggcaacccaagaatcatttttttttttcgttttataggtgtagatatttgttttattttgctatgtgttgtttagggaagtcagttatggtggactcacctagcgagctacgacccacctagcgtggttgcataatttcaaaatttgaagaacatttatatcagacatgctgggcgagacacactcgcccaacaagtgaacccctttgacttccttggtctttgcaattgttattttaaatctttgttttcattagaattcgttgggcgagttacaatttgaccagcgaatgacttcctttgttgtttaattgtttgatttctttcaattttttcgtggtttgcttcgcgagtgggtttgagatgaactgatgttgaatacacctacatttaacattgtgctgaacaacaccgattctgaaatcaatgtagtatgtgttctagaaacgatgtgaaatggctttgttgtagtagtgttgtgtatgtacaatgactagtccttataacttgggaaaaaagtaatgaggggttgatagggaaaaaaatagcgtttcttttcatttaacggttgagaaccgttattgattacttgtatgcctttatgtaggacgtgatactgacgttattggtggttgtgaccatgaggccgggagagtcagtgtagcacttgaagcaggtaagctctttgttcttgggagtttttcccattgactgtgttccaccatactccgagggagtaatgattattgtacgtcatgatgcatgtgtattgaaattgtgttactgcctttttattgagaacatgtatatgatgtacactatgatgatatgttgtatgattgatgagattctctagccagtagaatatattaaatatggacttcccgaagaaccaaagtcatgtggaacaactcttcgtggtcaattaatatgaatagaaaacctgagaaaatgtgcccttaagtggatgatcttctcttggaagagtcatatacgtctgaataaagtcctgagggaatgtgcccttcagtggatgatcttccttagacaatttatatatatatatatatatatatatatgctatatctgtgttgcattcccgatgttggtagcgcccaacggaatgacacctgtgttgtgatatacatgtgatgtattttatgagagttgtgatggctaaattgtgcgatgccaattttgatactatatgtcatggaagtgaaccagggagaggagaggcctccaagaaacctgagtttactgagattgtatctcaccccgtgtggggattatatttttacaggtgatgctcagcgagcggacggtggatcccagggcaagaggcccaagtagggatatggttctgtgtgaaccttaggcatatattttgagagcatgttggctcgttgttttgttatgcctatattttgtagccctaaggggaagatgcacaattgatgtacattatggtagattttgagagatattgatgtatgcagagaggacaaggtatgtgatagctattattgtacagccattgtggagttacattgattgagatatatgaatatggctcatttagtcctctagctgtgtgatgtgagtgttcaccgtacataatgtaaagtgggtattgttgttgacatttgatgacgtcattttgttatttgcttccgaatttattatctttaattaattgttgcgcttaacgatcataattgaatgttaatgaaccagatgcatatggggtgttacaccattttaaagttggttgccacaaaaccgtcttcgaatgtggtgctgtggcattttagtaataaattggatctttttaaacactgttattacaaaaccacctttgaaacattttttcaaatatggttttactaagaaactgtctttgatttgtctttatttttctcgtgggctgctctcgcccgttcctctcctctcaccctcacattcctcaacccaaaccctaaatcccttccctctaagtgaccccctctataaggaccctcactgcggcgcgggtggcgccagatcccgcgctgatagcgctgggatccttcagcagaaaaccctgtacaaggtgtggcgctgatggcgccagactcactggaaggtctcgccaagggcaccaggttggcacggagagcgccatggtctctggaggttggcgccaggggcgccatagcggcgcgagagacgccagagtttgcagccagcgcggacagcgccaggtgtggcgcaggtgacgccacaggtttgggaagttggcgctgatggcgcgagtgtggcgcggttggcgccacaaggtcggtgaagctggcgggatagcgctagacctctggcaggcccagtataaaaggggaaatcgcgttttcagaagagaaaaccttctcttcttcttccccagcgccccaaacctccatgggagagcttcccaaacttccatgaccttgtttcttcacccaaaacacttcctaaacccatcaaacctcctagaaatcacttgtgagctagaatccttcctccatttcaccaaaaaccacatgctttgagaaacctcattctcaagagaagtgaagaactcgagtttggagaggattgacagcaacccacagacacccaagcttggaggagtgtctcagaggtcctctgtgtcgccatagaggtaagaaacttgagattcgttggttgtttaagatttggggttttgggtgaatagtggtccatttgtgatagagctagaattagctctgggtctagttgagagatgtatttagaatgatgaaaggaggaaggattagcttttagtttgtgatttggtgaatgttggttttggctctagtttgtgcatgtgtgacttggactgagtcacttgacttgagacatgcaagagccaaaatgatgggcttgtggtgcctgtgaggccatggaaacggtatcttgtgagatagaccgtctaagccctatggaaaccctgagtatttgggttgtgagagctgtgatgcttaatggctggtgttgagtctgtggggactctgaggccatggttgggttgagatagaccactgagggcttatggaaaggcttgaagtggatgaacctgatgaaccttaagttagataacttgggttgatggaaaggactgaggttcctttcccagaggcagttgatgactgcttgatgagcttgttcatgttatgtgcttgaatggtctgtaatatgcatttgtgtgccttgatagggcttgacacgaggtgtcaaagaagcagaccattgttcaagaggctggagtcgcaggcacgactgtcaggtaagctcatcgttcgaggaattattccctttctcttgtttgccatccaagtgggtgatagttgcatgccatgtttaattgtatatatgtttatgtgcatgctgtggagagaaaggtctatatggcttgttgtgttgataataattgttgtgagcctgaaaggctagatgaacggtgcttggagtgagactcagaccgttccagaaatgtgaatatatgatggcctagtgtgtgctgggctgaaatgatgaaccctaggataaacactgagatagtgtgagggtgttttgtcacttgtggtttcaggtgtgtggccttgggcctctagattgatgaacactatgagagtgttctgtgactctttatgagataaagaccatgagatggtcagtgctggaatctataagatactggaatagtatcgggctagatgaggttccttagccagaggaagagtttgaggactcccttggaatggctgatactcttgggaggtgccactgctctccgcctaaagtcctaaggatggattgccctgtatggatgttcctccttaggcagtgatgatgaaagtcctgagtggttatcctcgggccaatttctgagagtcctgtgggatgagagctcccgacgtggattgtttctcacaggcagcggactgaaagtcctgagggatgagagctccctgtgtggatagtctctctcaggcaggtgattaaagatcctgagggattgagagctccctgtgtgtggatagtctctctcaggtatctaactgggaaagtcctgagggattgagagctcccgatgaggatagtctctctcaggcagttgatgagtagtcctgggggattgagagctccatgtgtggatagtctctcccaggcagtggaaagtcctgtgggatgagagctcccagtgtggatagtctctcacaggcagaggactgaaagtcctgagggatgagagctcccggtgtggatagtctctctcaggcatgtgttgtgaaaatcctggacgtgattgccccgtgtgggtgttctttcccaggccagtgtatgtgaaagccctggaggtgattgccctgtaaggatgttctttcccaggccaggctgtgtacagatatgttgtatctctaagaaaaggcttcccgaggggatgagagcctagggcctcttagatgagccatatctggattctttaagtcctgagtagatgactcaggaaatgcttgttttagtggatgaggcggtgcctctctggtatggaaagtgtccagtggttgacacttatgttaaggtacctctgtgagacgagtctgagatggcttgagagccagtatgaggtgggatacctctgatgctgatagcatccagttagtacccagatagctaggaatgtgtgatagccaggatgatgtcctaggctttgctatgatttgtttatgtgtctgtgcttgagggtgaaccagggtaagggaggatctcccagaaccctgagtttacttagatgtttatctcacccctgttgtgggttgtggttttcaggtgcttctagaggagaggagctaccaccaggtaggaggccctagctgagtgtgctgaagtggtcatgggctgcagttgaagactagaagagttctgttgtttgatctctgtcttgtaccctgtatagggatggggtgtgagtgtacacctgttgtactgtacatatgttgatgtataaccacagatgtggtcgaaactatgagttgtatgtatatgtacaggttatgctaatgtgtatgagattatgtatcctcctgtttatctgagtctggtgttgtatgtctgcctatgttgttgtgtatgtgtatctggatcaacaggagcttgttatgtttatgctttgtgttgtgcttttatattccatgcataatgtaatcaagaaaatcgattctatcgcttccgcaccgcttttaaataacgatgatagcgcggttatgatattattgatgataacacgtccggggtgttacaccctccctcctctcctccctcaacctcaacgacgtggcgtgaagcagggtgacacgatggtgcttttgtacctatgcattctgccgatgtttcacgtgtttgggctagcagtggtgatgtatgcggagctggggtgagggagcgcggtggtggtgatggagaggtttgagctagaggcgatgctgtgggtgacgaagcacaaggtgacaaagctgtgggtcgtgcctctgagcctgcttgctctcttcatcttttgttgaagctcgcgaatcttcctttcgttctcgtgcactccactctagtaagaacccctatcacaccccttctcattttcttcttttgggttagggcaaatgtgccctttctcattccaaaggtaaatccaatggtctcaaatatctgtacatctttgattatatttaattagtacatctttgttctgtagttaattgatgctaatatcatttgaccaatgtgaggaagcaagtcaagtagcgagtgatgcagtagggaatatcagaacagttgccgcttttggtgctgaagagaaggtgatggaattataccagagaagatgtgtaggaccaattcagacaggtataaggcaagggttagttagcagaacaggtttcggcttatcactcttctttctgttctctgtttatgcatgcagcttttatgctgtgaccaaacttattgagagtggcaaaacaacaatcgttgatgttttccgagtaagttattgtcctatctttgtctcaatcccacatatgaaggtttttacttatctgaattgttgatgacaatgtctttgctaatatctcagataaattaaaaaattgttcttctttctctttaaaataaaacaatgcagataatttgagagctgagctcatcacactattctagcattgaacaattcatttaaaataattttcaggtattttttgctctctgtatggcagctatagcaatgtcaaaatctggcttcgtggcctcattaggatttttaaaatcttagtccattagcttataacaatttgcattgcctttataactatcttttgagttgttagagaaaattcaagtgctgacttaggaatggaataagactatagggggttctcttattctttatcaagcctaaggtgaatgattttagtgaagatgaagttgacactgaaattgaaagtgaagatgatggtattatgctatcagttttattttaccatattgttttccttgattttagtgaagatgaagttgacactgaaattgaaagtgaagatgctggtattatgctatcagttttattttaccatattgttttactgttttagctggattgttttcaatttttattttaccttattggttctttcaattttcatccagcttgctcaattagaggctcgagaatgtgtttgcatgaagataacccacatccacttagattaaaaggggttcaatccatattttgaagtctaacatcaggcaattctccattccttttcagcaatctaaaatattgtgcttggcttttgtttccttctagttgcgtggaaatgcaagtggtcataatcttgctttatctgtgttgaaactctaacaactttaaccaaattgacaagagaaggtggttctctgtattcaaattgttttctccttgttatattgtatttttttttttgtgtgtgtatatatatatatatatatgacatgagaatatggattttttttgtgtgtgtactattgttttttttttcttcctataatcacttttatgagtttttattttctttttctttttttggaccatatatatatatggtattctaagttctaacatttgacttcacttcttatgttaattagattgttaaaggacacatatccagagcaccttctagttatccaaccacactatccacaattcacttcaatctggttgtgatacttctcacccatgtttgagttatcaatgtctcacattattttcacgtaagtattttctactttcaaggatttgaagaaaaaatggtgaaaacactgctagaaaaaaaaaatggtgtaaacactactaaaacacactactaaaaacgcttccttgttttctaaggaccgtgtgtaaaatttatgggcattatgctgcatggatttttaaaggctgctagtttaagcagttacgcacatttttttcatcattctcatcttggttattctttgaacaggggtcaagacaaaaaattcttacacatttggggatcaatatgttcattttaatgtcaacatcccaacgagagtgtcatatcacatattttatagtgtcttttattatgtgttgttcactcctctttctacaccatgtttaggttctctattggatgcttagaacataaaggcttgtatttgaaatgttattacataagcctgacacagagacaacgtgaattaattgaagagtttgccaaggaaaagcaagaggaatatgataaacgaagaactgcttcggcttctagttgaaaacatttgcagaatctcctctatttgtttattgtcaagtcatgctcaactaggtgggaacccacttgttagaatttttgtaggagcattaaagattttttttttctttgccccatccacacatatagtgtatgtaatattttttttgtcacaagtgatgttaacaatttaaaggttagtatttagaagacaattcccttgtggttagtgcctcaacaatgaaaagctctaagaaatagaaataaagaaatagaagatgttaatgcctcaacaatgaacttccttttctgctttgggggtttgattctggttttgtacttttatgccaacgacaattcaggtttctttttgctctaactattaatggagccaatttgaagttctgtttccaatttaattgaaatccttttatatatactgttcatgattttgtattcaaaggacaaggagtgtggagattttcacaactttatttctttgagcaagttatgcacttagtttttatcctatggaatcctctattaatgcagcaagcatggaaacgttttgacaaggctagccttatttatgaccaggtgtaacgccccctcaatcatcagggtcattactaaccataatccacaataatacatataattaatcagagtttaagcagtttggaagcagatactaaaagtgacatcatcaaatgtcatctgcataacactgtacacataatatggtgaatatatatacatctctgtttaagtacaaaactgtacaatatcctctcagggtacaacaaaatcaaaaccaaaggcaaaatacaaaacatcagagccacatgctcatgtcatctaagcctaaggttcacaaacagcagctatccgtgcataggcttcttgccttgggatctatctgctcctcctgaggaatcacctgcaaaacataagccccacacacggggtgagatataaaatcccagtaaactcagggcccttgaaggtatttccttcccctggttcacttccatacacatatacatgaaaatagtatatcaacacaaatccatatcaacatcagagtatcatcaatatgtattcatctgaccacaatcagtgaatcactcatcaatgctcatgcacaacaatgcatctctgtttgaccacaatcaaactaagctcatcaatactcataactatcatgcagaggctacatctaagtatataggaacatctccactcagggaggctacctctatatactaggtacatctcctgcctgtatatacctatcggaggcttcctctgtatatataggaacatctctcacacgaggcttcgtctatatatatcaggtacatctccatttggtgaggctacctctgtgtatataggtacatctctactcacaaggcttcatctatatatcacaggaacatctcatcctctatcacaatacaattgcctgaggaggctacctctgtgtatatgggaacatctccctgcaggaggctacgtccatatcacaggcacatctctcaacaggtcttgctcaatctcaatcatctattctactaccataggatactagtcaagcacagcatgcatattcaagtttcataatcagccaggcatgctaccattcaatcaaatcatagctatgtatatcaatcccccatcacatttcacgcatagcagatcaacacatctcaattccctttcacagggcacaaatcatcaatcaataggcattatcagcctcacacaacatccatatacatgcattcacgcatatcagaaccatcacctcacttggtgaatggtggaacacagcaaaggatacacaaacaagaaccaagagcttacctgctctagacagatcaccggctctcccggcctcgtggtcaacaccaccagagctgtcaagctcacgtcctacataagaacaagcatataactcatcaagtacggttctaagccgttagaacgaaaggaaactataatcctttctacataacatataacaaatcacttcacaagtgattctcagaccctcacaaggatcctactcagcctacacacggctccagagcctcaactaagactctgatcaggctaatatcaagcatattcctgctttagccttctcaatatcaaacttctcattaacatcaatatcagcttacacacagtatctatactatctctggaataactttgtcaactgttctaaggttcatgctagtcatatcactagccttttatctctgctcatatatactcagagccaaaatcaaacttcatcaataatgatgattcaaggctctaacttccttagaacaaccctctgagcataaaactctacagagtccaagcctaataacggctctaacacctccaaaaacagctctcaaggtattcaaaaccaaccaaaaatccaaacacagaattaacggctaaagctccagtttcttacctctgtgtagcccagacacaccagggaatcactttccctaaggcagatcgctcaaacaaagcttcctttgcctctgattcttcgattccaagggctcccttagaaatctcgatcttgccgtttaccgcctcttgccgagaataaagccgagtcactagcttatctcgaggctctgaacactttctcagttgggtcggaggtgtttagatgaaagatggagaagatacaaagctctctctctctcaacaatggctttttctctctcttcctctcctccattttcgtccaaatgagctatatatataggctgcccgaaagtcccacgcgaatcgcgccgcaactcggacaagccacgctgtccgcgccaactccacgctggtggcgtggaatggccgaaacaattggcctgatttaattctcttgcgcggctcgcgccagatctcgcgctgaccgcgccataggttcgaatagcccatgccattagcgccatatccacgctaatagcgtcaacaggccgaaagcacagcccttatttaagccttccgcgcggttagcgccagaccccacgcggttagcgccacttgttcgaatctgttttctccttcttttctcaagcttttctcttagagattctaaagcatgttcattactcttaatcatgacttaatctaggcttaatcacatgcttaaaattcaaggtattacaccaggtgcattctcaatcacaaattatttctaattttcccatgtagattcctcttgttttgaacaatatggatgttatgcatactgcctatgataatgatccattcaagtagaatgaaatcaatggatatatagtgttgaaacatcattgtacaaatgaagttgccatgtccctatatggatatcatgtgtgcatctcactttgtgtgccatgttcttaatgtaattatgaacttaatttatttaattacataaaccttttacaaaaccttaatctgatttatatctaattaagttagaccaaatggactatttgtctctcgactggaacaagcacatagagaattgggacatggaacatttctaggaggacatgctcttaacttaacgtgtgtcttgcatgcatgctcattgaaaaacaacatgtttcaataagctaacacactaacaaggtccttaaaacatgaaacttcctaactgactaaaactaggaaagcaacacttctcagttttctaacactgcacaatacattttgttatctttttgctctctatataaagcccataaataaaatattgatgcatcttttacctgtgatagttggtttaacagcagcttctctagtcaaagaaattgatgaagtaacaagtcctaatagccacatgtgtgttggttttgttgtgatgtttgttataacaatttcaactggtacaaatgttgtgttgagcagcttgcaatttgtcacaagcaaagcatcctaactaggtatcttgattggtattctagtgccctttccattgcttctacttgtttctctttcaatgaagatcaagaagtttcaagaaaatagagaaaaattgagaatctactacgattttactatgaaggagaatgctactagtgaatagagggtggagaatgaggtgaaagaggatgaagtagttgaagagtttggtattatagaagaagttggagtgaagttaatgatgaaaagaataaatttctggttatatttctctgtctatttttttgtgcaacaattggttagttggtttagtatatcttaacaacttgggacaaatagttgaatctagatgttgctctaatatttcattttggtgtctttggcttatcttaaaacacaaaatgaacttctggtaatttgctaatattgacaacgttaaggcatataatgtccaaatatttggtattgtttgtgttatacatattgtttgtattttgtttggccaattcgctaaaggacataatttattttgcgctttattttttaaatatctaattacttaaattgactgatgttgagtgcatggcataagatatatacaacttctaattaactctttttattttccttccatatactgacttgcatcaaaccaaggtactctaaattgctcaattctcatttctttcagaggtgtttgctggagatgacatgcagtttctttgttgcatcatggactgtgtacatgatgaattgattgatttgctactagaatatagcaaaaggaaggaaagattgatagaacagagagatgagagattccttattcactaagtgaattagttacagaaaacagaatgcccagctatttttattgagactaatctaatgactatatattgagactggttatttattgagattctggtaatgatatgccactaagaaactagacaacttttgttagtgagacaatgaaattctgtatgtgttttcattttcaggtaaattttggtccattgagttttggttctctcaaactcaagtgtgtctaaagcattgaagcagaagtgttgtactcatggaataataatgtctttaatctacatctcgactatggtaagtcaatgcatatccttaatttgaatacgtgcatatgttatttttacctttttattggcaaattgttgttctgtggaattggtattgttttttgaacaatttattttctaatctgctttttttactagctggtatttgcttaatgcaatggggtgtctcttagatttgctttctgttttgtcatttttcgagatatcttgcagattgaattgttgtcaatataatatagtgaagggagcagattgcctattgacaagtacaacatgtattgcataaacatattttaaatgctacgaaaattcaattttctaattagttgtagtaggatcacatgatagtttgtggtctaaaagtatgttttttctttaaaaaaaaaatttaagtttgagttttgtaaataaagattaagtgttgtaagagttttattacggtggttgttacagtgtttgtgtccttggaattgtttacaaggctcttatactacacccttatggctatccttgcctttatcatcctctctgttcttcctagattaattgatgtctattgatatactatacccctatggaattgttaacacaaaatgactgctgcatcatttggtcaggtactttttgctatgacaagggagtttatttataattagttattatgctgagagttggatgcttttatttggaacttggaagcgtttatgtgatgatatgtcttgctcattttatgtttctacattttctaggtttatataatttctggggttcgttctctatatactttcccccatatattcacaatgagtatccaaagctctactggaattttaaccattctttctatatcaacaattataaagccattgcttcaaatgaaggaaagcattactttgcctattgttaatttttgtgctactgtattcttatgtttttttttgtttgcttgtgaaatacattcaagttttatgtttctggttccttttttttttttttttttacattcaagttttataaatctgttgaaaaattaacattttgggtaataacataaatagggaagaatatatgttaattagagaacagtatgtaagtttgctagttttagaggatttcttaccctctcccttgcactttcgttctttctataataatatactttttggttgaatgtctggcttctaagttctgaatatattgtacactaatcaatgtggtagtgactaatcattttattttctttttctttttctttttttgaaccatagtttacacttgtattgcatttttactccaacaatgatatatatatatatatatatatatatatatatatatatatatatatttactccaatgtataaatgttgttgttattattattattattatagtaaacttcgaagacggtttttgcaaaaaagtcgttttagaatcctctattttttaattaaaaacatagacattctaagatggttatctggaaaattgccttagaaagtagacttctaagacgatttttgctaaaaaaaattgtcttagaatcgttaattttttttctttaaaaaagacattttaagacaattatttggaaaatcgtcttagaaaacatacttctaagacgattataggctaagaaccgtcttcaaatgagacattctaagacgatttatcctataactgtaataaccctaagtcattctgcgaacggcacaagcatcggagcgagtttggcgctattataacccgtgttgctgaaaaaagaccatttttggggttttgctgtgtgccacgcctggggcgtgggaacccacgcctggggcgtgggaagtgctccagaaagtggattttcactggagtgccacgcttggagcgtgggatgccacgcctggagcgtgggctgcacgacagggcctatataaggcccaaaagctcgaaatcttgggccatttcttcttcttcttcttcctcacgacctagacctccattagaggtgcttctaagctttttgggaccaattttgagagcctaaacacctcttgaaccctctctgtcacctagaaaccttgtgtgagcgagaatccttcctccatattcatttgaaaccccagagaactcatcctctgagagaggctgcagagaactcgagattgggcaaggaacggtggtgtttcagctgcaccaaggctagggagagtagcccagaggcctttctcattagttctgaggtaaggaactcgagtttctccgattgattttggatttgagggtttcctgtgaatagtgacccatctgtgatagagctagaattagctctgggtccaattgagagatgtgtttagaatgatgtgaggaggaaggattagctttcaatttgtgatttggagactgttggttttggctctaggctgtgcatgtgtgatttaaactgtgtcacttattttgagacatgcaagagccaacctgatgggcttgtggtgcctgataggccatggtgacggtgtcttgagagatgaaccgtccgagccctgtggaaaccctgaggttttgggttatttgagctgtaatgctcattgttgatggcttggattgagtctagagggactctgaggccatgattgatctgagatagaccactgaaaggcctacagataggcttatagaggattagcctgagaaacccttgagtagatgactcgggttgatagaaaggactgaggttcctttctcagagacagctgaggactgtctgatgagctgatgattgttatgtgactgaatggtctgtgatatgtgtttggtggccttattagggcttgacacgaggtgtcagaggagcagaccatcgttccagaggctggaagtgcaggcacggcttgccaggtaagctcatcgctctggggaattagcccttttctcttgtttatcatccaagtgggtgaagaatgcatgccatgcttgttgagatatatgtgtatgtgtgaatgtgcatgctgagatgaggaaggccagtgtggcctgttaattgatgatatatatatgtatgatgaaccttaggatagacaccgagatggtgtgagggtattgtgacacctgtagctgcaggtgtagggccttgggtcatggattgatgaacactgtgagagtgttctgagatgatatgcggatctgagaatgatctgtgatggaacctaaaggatactggactagtatcgggctagttgaggttccctagccagaggtagagtttgaggactccctggaatagctgagattccttgggaggtgcctctgctctccgcctgaagtcctaaggatggatgtttccttaggcagagatgatagaagtcctgagatgagagattcctcaggcattgtttgtgaagtcctgagatgagagattcctcaggcattgtttgtgaagtcccgagatgagagattcctcaggcattgtttgtgaagtcctgagacgagatattcctcaggcattgtttgtgaagtcctgagacgagatattcctcaggcattgtttgtgaagtcctgagatgagagattcctcaggcattgtttgtgaagtcctgagtggagagattccccaggcactgttgagtaaggcctgacatgagatgtttcctgtggtatagaggtagcctcctagtgtggagatgttcctatatccacagatgtagcctcctcaggcgattgtatgagatagggcatgagatgtacccgttatataggagtcctccagacgtggttgtacctatatattcggacgagcctcattacagagatgtaccgttatataggagtcctccagacgtggttgtacctatatattcggacggcctctgatagatatagtgatgtcctgccatgagatgtccaagtatatagagatgatcttccgtgagtggagacatggcctatatatctagatgaaagcctccgtaggatggatcagtgatagatggcgataaccatcggaatcacatggatcagtgatagatggcgataaccatcggaatcacatggatattgattgtgtgtggaagtcctggcgggaccaggcagcttgcaaatatgtggtatctctagagagggttttctcgaggagatgagagcctagagtctcttagatgagccatatctggatgagtaagtcctgagtgtgagtcctcaggcaatgtttgcatgttttgagaggctgtgtgtctctggtatgagtagtgttcggttgtggacacttatgatatagtacctctgagagatctctgtgagacgtcggtaagagccagtatagcatattgatgccatgttgatggcgtggctctgtgaaacgaggttgagatggcttgagagccagtatgaggtgtgagacctctgatgctggtagcatccagcgggtacccagtgagcgggggaatgagtgatagccaggaccctgtcctaggcttattatgttgtatatcggtgtatatgttgggggtaactagggtgagggaggattctcccagaaccctgagcttactgagatgtttatctcacccctgttgtgggttgtggttttcaggtacttcctgaggagaggagcaaccacatggcgtaaagtgtcgctgagagtgctggagatggtcatgggctgcagatgaagatttaaagagttttatgtatatctctgtcttgtaatataaaggatgtatgagagaatgttcctcctgatttcctctatgtttagttgtatatatctgcctatatcttgttaagttatgttagttttatctggatcgacagaggtttgatggtgttttcatgtgatgtgttttatattccatgcataatgaaatcaaggaaaaacgattctatcgcttttgcaccgcgcatagttaacgctgttagtgttagactgatatgttgggtgataacgcaccgggtgcacacggggtgttacaataaccatcttagaatgtgacattctaagacggttgttacctataaccatcttagaatgctgtaaaaaaataaataaataattcaaagacaaattctaagacggttctaggttaacaaccatcgtaggatgtcttacctttcaacggcgttggctacaatgatggttctcgaaccgacgtagaaaacattgtttgtagtagtgagtgtttatgagaggcttcatttggaacaatacaaagaatgttttgactgatgcttatatttgaaacctagtcatggaaagtcgcttaactaaagcgtcttggaggattaggcattcgccgaactaaggaggctaataaagctttcctttgtaaacaacatttgggacctcattcacaatcaggacaactctttgtacaaatcctttcaactaaatacttaaggactcttttgttttcgacatggaggccaatcgtcttcccaggaatgttgaagttttgaatgatgagacttggccttcatggttaatcatcaataaaataaagaaccttttgaagctacttcaacatgataactcaagggcttctatctcgacaaccatcgatttgtctattggaaacctcctattgatcattggttcaagctcatcactgacagaagctccctcggcaaccctagcctggccaatattggtggtattatccgtaataacttaggaaacttgatcattgggttttctggcttttgttgcacaacaactagccttcattcataacttcttgcgatatgtgcctagggctccatctggcgtggaatcatggcatctgtcacctcatttacaagtcagattccaagctaacagtggatctcatctcagctggagttaatgctcttcatgtctacgatactttgattttaaattaaattaataagacatttgcttacccaaaattaaattaatggtggtgcatttttgtctaagtctcatattttgggtaaggtattatcacattagaaaattcaaaacaaaaatatgaaatattaccttaaccaaaatatgagacttaaccaaattaaaattcagtcattaaattaattcttacaaaaaatgagactcaacttgattttgtcattatctaatgttgttacaatagaaatttcagagcaacaaacaaattatgcttattaatcaatattatgtttattattatgtttgttttaacttatgcttgttttcctaatttttaagtgttttttataattttatgcttaaaatgattaaaaaaggaaaaaatataaagattaaattatattttgggtagagagttgacaaatttgtcattgtcaatttagactctttccattaactataactaactaaagttaatgtaggaatttcaaaaattttcactttcaaagacattgaattttcatcttttgaaaatgaatttgttagcactatagacattcaaggacaaaaataattatttaccataaaatctttcacacacacatatatatatatatatatattaaattttaaaattttgaaacttttagatcatttcatatcctaactttaaattaaactctcaaatattttagtaaaaaagataaaaatttgagactttattaaactatttaaatcacaataattaaaaaaattaaagcaataaataaaaaataatcacgaacccaaacattccattaattgtgacataagaattgaaaacaattaatgaaatatgtaatgggaaataataataaataaaaaaatttaaaataaaaattattttcccatacataaacaataaaaaagtatgaaaaagatgtatgatgtgaaaaaatgtatggagagggaaaaaaattaaaaaataaataaataaaataacgaaaatggaaaacaatagagaaaaaaacgttcccttgtccatctttcctctctcattcatgctttaaattcgcactaacctctctcagcaacaccaagtaagttatcctcgtttcttctctcattccgacacttccaacgtcccaagacaaaaatcccaacatgtcagaatcagaggagcgagccacgctgacgtggcgcaaaatccccatcctcctcaaatcctcccccaacgacgtcgttctcgtcccccccaccagcccctgcaaaaacgacgccgtccccggcttcttcgctccgggcagtggcagccgctgtaaattcgccagcgtctcggtggcagaaaggaaattcgacaaagaattcgcgcccacggcggtacagcttctgcagcaccccctcgccgtcgtcgcattggttcccaaagacgccgccctctttctcgctggcgccattgccggcgccgcggcgaaatccgtcactgcccccctcgaccgcatcaagctcctcatgcaggtgcgctttcgcttcgtttcacttttttctttttatcgccgttttgcgcgaataattctgccttttttctttctttttttttttagtcgatagtttttgttagtggaagattcgaacccacgacgtatctctcaatcccttcaccgtttacagccaacccaatcttatgaagatatgagatgaattggatggttaaaggagaagttaagagaaatgtggtggattcgattccctttgataacaaaaaagtaattaggcattctaataaactcacatttgccgataattaaaaaaaaaaaaaaaaaaaccaaccttattatatctccgcgttaatatgtctgtgtctgaaagttcggtcaaatgagtaaacaacattgcgtatttgcagactcacggcgggcgagttggacacgaaagcgcgaagaaggcgattggtttcattgaggtattaactgttcgcaacttcttttgcagtgtttggttctgttttttatattaatttacgtcaccatggttgaattttataatacgcatgtctttgtgatataatttaaaaaattatgcttaggttgaccaatgaccatgaatcatggtttatttttatattaatgcttctcttgttaatggattttgacatggaaaatggggccatgtcccgtgtatctttgggaaaatgtttttttttattattattgattattttagtggtcgtttaggtgttattttcttttgtgttttcactttgtttcttgttttctgaaatttaaagacgaaaaaatgaaaacacaaaaacaacgaaaaattgagaaaacaagaaataaagtgataacagaatgtcatctttatgtttattttgtttgctatctctttaagatttgtaaagggaattttgagaacaacaaaatgtggtgtagctggcttatgctctgaccactgatgataaaatattcgatgtgttatcgtcctttggggtctatcattgaatgtgggacagtgtgatttggtgattgttgtgttctgtaaatgcttaatcatttggttgttgattgataatttgtggggtttgtttaggctgtttcatcttcaaagtgtagcatgatgattgtagttgttggaatatattaggattcttattgttttacaagtcttattggttaagtcttcacgaaataggcttttactagttatgctacaacagtacttgacctcagttaagtacatttgcgaacaaattatataatcagatttcaatttatttagagggtgtttctctccttttccattgaaaccctgtaatttcaactgtagctgtttattagaatggaaattatcaactaactgatagaaggtttcttaagtcgctaattaattaccttcctgtgttgtgctttgttgcttgggttctccggtgaatgatcagaacattacatatgaaatttttgttggagcttacattgacatgatttacaggccataactgtaatagggaaggaagaaggcatcaaaggttattggaagggcaacctcccgcaggtctctataattaggaacaaatttattggtaattggtatttctgtatgtatacatctcctttttatgttgattagtgtttttcatttgtttgtgtttctacttttaatgttccaggtgattcgggttataccttacagtgctgtccagctttttgcttatgaaattttcaaggttagctgttaaactttctttcatgaatttcttttccccaatattgcatgttcatgtctaagttatacttttggatttatagaaaatattcaagggaaaggatggtgagctctctgttctgggaagacttgcagcaggtgcttttgctggcatgacatcaacttttgtaagtaaattcattatgacgcccagccttgtatgacttgcagttgctttcattatgttattctgtttcactgcaggggattaaaccttttgtttaacaattatgggaaatttcttgtttgtatttttcttttacattttttcttatatcttaatttcaatatatgtatccaacttaactttgtatatgtctatgtagataacttacccattagatgtcctgagattacgattagctgttgaacctggttatcgaacaatgtcagaggtatataacttagcctgtttaagtattttatctagatcttcatctgcttatgaaccataccgtggcctttctaggttgcattgagcatgctaagagaggaaggatttgcatctttctactatggccttgggccttctctgattggaatagctccatatattgcagtgaacttttgtatttttgatttgtgagtccattcataatcttttatcttataagaacattgaatattggaaagacactgataaccttctatggacaatagattaaagaagtcattgccagagaaatatcaaaagagaactgaaacatctctattcactgctgtggtttctgcatcacttgccacacttacatgctatcctctggatacagtgcgaagacagatgcaattgaggggtacaccttataagacagtattagatgccatttcaggttaggattgctccatgaaccttttagcatcagcgtattttagttctaacatacttatatttgtggacacattattaatgaatatataaaatagttttcattattgctgtgggcattgtaatattcctttaagctgatatgcagaataaccgacatttatttataagtttttcttatcatcaaaataatcaccattgtgtgtgccataaatgaatggatgacatgccatctttactctttagttaggaaaattcatcctaccaacataaggaaaaggaatgttcattaacggaggggttgtaaaagaggggcaatacactagctactcactggtgaacgcaaacacagtggtttcaaactttcaatcaaattgttaatctttttgtgatggatgattggtcaatggtgtgggaaaaagtaaaaattaaaaaacttgaattatataatcctagtccaaggtagtttgatttatgggaatttatttaaatgatgtggattttaagctttattgtttcagtagttatgtaatactcccaaactaattattttattgatgcaggtattgtggtacgggatggagttattggcttgtatcggggatttgtgcccaatgctttgaaaaacttaccaaacagcaggtacttgtgatcttctatttctggttattaatttttcaatctttgcactgtgcctagtgaaattacacttttgtttgttcttattttcattattgtgagttgtaacatttagtacatttgctggagcataaattcgattaaaattagtgtgtttatttgatattgctactgcctccatgccgttaagcatacaaagctatgataaatagagcttctcaccatggtattgtattttaatttgaagttgattatgattagatacctgattcagcccttgtttatctttacagcatcaggcttactacatatgacattgtcaaacgcctaattgcagctagtgagaaagagtttcaaacaattactgaggaaaaccgcaacaaacaaaagaaaccccaatagtcaaagacagtgaacctaggattcatattgtttttagccattcttttcccgctggaattttgtggaactaatgcttcagcaattctgtccagtattagcgggaattgctttttagatagccaaactgtcagcagttatgagtacataccagcaaccaatatttggtatattggggctatatattttgcaggacactgtatgctagttactgtaatgctatattcttttgctgaatgtattttagctgtacttttttgtagggattttgccaaactgaatggcaatataaacagagatgtcaaagaagatactttctgacatacttttcccataatatatcactttatttattattttttttttatcatttagcatattatattatatagagtaaattacatccgcatcccatgtgttttgtttaaatttcacttgatacctctacctttttatgaaaaatcttttaattgtttagtttacattacacccataccccctccgtcctaaacatcgtttaataatttaacaaaaagtagacacatgttggtcatatgacttttaatgaaattttatgtttaaaatatcctcatctttttttcctcttaacctgaaaatattttaatactttgtttctttttgtatattttctaattggacgtgaatctaactttttgttacatgtgaatgcaccttcttggtacgcagtattaacatcattcctcccccttcttcttcttcttcttcttcttctattttttagttcaatttttttctctgattgaatatggtcctttgcttcaaatttagtgttttgctcctgcatttgtgttctgtgattccaaacatcaaccctattttaattagcaataataaacaaatggttttcagttcatccattgtgtttcatatagtcccaaatatcaacactattttaatcaacaataataaacaaatgattttaactatcataagtggttccaaactggttccttattaaaacccattcagaaatagacaacaataaacaatcaaaattaaataaatattcttaaaaagtaatctatatacaaggtccaatagtcatttacaagcagaaccataatgtgaacagaaatcgtgaaatagaaagagaaacaaaggaatagtgaagaactcgcgatctggaagaggaacaatggaaaacttgtgaactagaggaatgataaagaagtcgcgaatggtgaagaggaatggaatgtaaacgtcatgagaggaagaggaactcacaccccgtggacgctaaaaaagaactcgccaaacgttatttaaggacgttaaaagaagagggtaaaagtaatgtgaaaaaagaaaagggtatcaggtaaaatttgagcaaaatataaggagtgcgagtgtaatttattctattatatattgtgttttacttagtttttattactattatagtattattagttagtttattatatttttatcactattattttaacttagtatattatatattatcttttatttagttcattattattattattatttagtttattatattttttatctctattattttaactttttaaattatatattatgctttatttaatttgttattattattaattgtatagtctatttatatgttatgctttaaacaattttttatagttttaatactattatctttacagaaccggttactcaaatgttggacacaacttaagagcccaaagctcagaaaagacaagggaattgttatttccactcccatttttactagaatactcccactttattttttcttttccaagagcacctaagtaaagacactccccttcctaactctggacaacaaaggcttctccaccattgtcgttgacaacgacttgagtacaagttcaggggaaacaagatggcagcgctcgacgtcaacaatctttcttggcctggtggttgcgacgatgtgaagaaatgaaacaaagtgacgtagaattttgtgagggttctgaaacctccagagcttggatcaacaacagtagcaatttcgatagcgtgttgaggttgtgttgtgtcgcaattatagaaaggagaatcatccatagaagtatcactgcgtatgtttacaattcatccccctcaaataccctataaattaattaatcttttaaggtattatgcactccccttttttctaattcttttgtcatcttcaaatttggagttggcgcataattaaaatgggtgcagtaatgtgcgttggtttggagaaggaattaaacacaggtagaagaaggtgttggtgttggtgttgatgcggtacacaatgatttgaagcttgttgagggtgtggtagtggtcatttgtatggctcccacaccaattacatcacctagcttgccataactgcaattcttcgaagttggccgaggttgattataatttggagtgtgtgagtgcgttgattacttatgttacggatcaaagatatgttatcttttatcctatttattcaaatattcaaaattccactaacccattatcataaccatatggaaacagaaaatctgttgttgcaaccactattagctatccatatctccgcatatcccggtagaagacagtgggcttcaaccgttcatcatcaggacccaggttagattcctataaataaagcatccaccatggtgaaaggtacacacacacacaatcctgactctctctttccattcacacggcacacactacgcaccaattgtgttgcgggtcactgcggctgtgatccttttctcctccaaatagcttcatcctcataagctacttgcgagaaagggagagcccggtcctacataaaatcatctaacgctacttgttggacatttctgttctctttgagcagaacaacttaattaagcttgattgtgggaggggtacggaggtattatgtactataagcagagtagtgtggttttttctgggtgtggaaatgattcaatcatttgatggttttgaaggggtgacgattttcagggaatcattttgtgacacatagttattattattagatgaaattcagcaagtaacaaggttatcatatcattcttatgaataaagtttattttgccattaaaaaaacttaattaaaccacatatgaattggcggtctgcattggaaaggccaaaagaatttacaaggggagtgcaaaaccttaggttaaataagaggcagaaagaattaggaaaatgaaatgctaaatcatattgcggaaatagtttttattttccttgaatatgtgaatggtacatgggaggtatatatagaatgcacaagacaaaaataagagcaataatctagcctagaaatcacgaattgatttccctatatatgctaattctaaatatggtaaagacaaaaatgacaactaataattatgtacataaaatcctaacgagctgtaaaaattgaacctgttgattctgtgttgatcttcaacacttcccctcaatctggatggtagatatctatcatacctagattggatctgatattcttgtatacattccttgatagggcttttgttagaatgttcgttgtttgctggtatgatggaacatgactgacacttataatcttataatcaattttctccttactgaaatgtgtatcgatctccacatgttttgttctatcatgatgaattggattctttgcaatacttatagcagccttgttatcacaaaatatcctcatggtgtagttggtaggaattcttatttcattcaacatttgcttgagccatattccttaacaaacatcgtgtgtcgtagctctgaattctgcttgtgcactactcctagccacaatagactatttcttgcttctccaagttaccatgttcccccataaaaatgtgcaagatcctgtagttcattttctatcagatagatttcctgcccaatttgaatcagtgtagacttcaatacctctgtttgagttcttctggaaatagagtccttggcctggtgaggtattggaggattctattcacatttctcatgtcagtttcagttgggtttgacatagaacaactagccatgcttatagcaaacccaatgtttggcctagtatgagttagattagttttccaactagactttgatatctatctttatcagctgctacactttcctctttactccttttgattggttctatcggagtattggctgctttgcatccaagcatcctcgtttcttgaagtaaatctagagtgtacttcctttgagaaacaaaaatacctttctttgtctgagcaattttcatccctagaaaatacttgagttggcctagatccttgagttcaaattcctctgctagaagattctttagatgatttatttgatcataatcgtctcctgtaattatgatatcatctacgtagacaataaacaaagctatctttccatccacaaaatgcttaacaaacatagtatggtctgtttggcattgagcaaaagcatcttgcctgacaacttttgttagcttttcaaaccacacccttggagattgtttgaggccgtatagagatttacaaagcctgcacaccatgtttgaggtgttgggtgattcaagtgtttgaggtattttcatatatacctcctcttctaactccctatttagaaaatcattctttatgtctagttggtgtagaggccaatctagatttactggtagagataataggacccaaacagaattgagtttagcaacaggtgcgaatgtctcttcataagctactctatatgattgtgtaaatccctttgcaacaaccaagccttgtacctgtttatactgccatcaacattgcatttaattgtgaatatccatttacatcccattgttatcttcccttttggaataatgaggaaacatctttttatagttgttgcccatttgggtctttgtagtgcctcttgaatatttcttggaatttctacattgtcaatagctgctacaaaggacttgtaattttgtgacaatttttcataggagacataactctcaatagggtgttgagtacaagttctcaccacttttctctcagcaataggaatattagtatgttgtatttatatcaacagattcagggttaagaagaatattacctgtgggaacttcatttcctagagcctggctggattcatggttttgcatggagttgtgcttgactctacatccttcctcctttttctcttataaaccttccagttatcttcttgtgtttctgggccatggttctattgagatgtagttgaaactttaaatatatcctgttcagtttctgctccaatatctatcacaacggctactacatcctattcaatttctgttataggttttgtcacaacctatgtcgtccttttagttggattaggtataggttcaattgtttgagtgttatggttttggtctggtaaggtttgtgcataagtagagcaggttcggttatctcaagaaccaaaggtcggtattctgagttttcagttggataggtgtttggttgctcccctgaatgccaactttggggtaataaggctgattttcaaagaatgttacatccatagtgtggtaaaaaaaattagtacggggagagcaatacttgtattcttttttatgagcagagtaaccaagaaatatgcatttgatgatttggggtccaatttgctacgatgagggtttaggttgtgaacaaaagctgaacatccaaagattttgaatggaatggaataaaatattttgctggttgggaagaaggcttgtgtggagaagggggtcgtaaagtcaaggatacgggaagacattctatttataagataggttgctgaaaggacgatttctccccaaaattgttttggaacattggaggctagcatgattgacctagtcacatccagaaggtgtctattctttcgttccgcaaccccattctgttgggggtgtccacacaagaactttggtgaacaattccaaacttttgaagataagtttgtaatactcacgaccattgtcagttctgagtatccgagtcttgctttgaaattgtgtttgcaccatattgtcaaagatctcaaatatccttcctacttctaatttttccttcattaggaacacccaagtgatgcatgtgtgatcatcaataaaggtgacaaaccatcttgagctagtaatgttgtgaactcatgatggtccccacacaccactttgaattagtgagaaaggtttggataattgataaggttggggtgggcaatggttgtgtgtatgttcagacaattggaagatttcacactgaatatgtttcttgtttttattgaataatgagaaaacatctttttcaagtacatgaaattaaggtggcctaatctatagtgccacaacgtgacataattatcactacttggaactacgactgcaacataagaatagttcttgagttcttcttttggtttttcaacttgaaggaggtagagtcaaacacactctttagcattgttaatcgtcttcctcgactccaaaatccgaaattcacacaagttttggaagaatttagtaacacatttcaaatctcttgtaatcttgcaaatggatagcaaattacaatctagttttggcacatacaaaactgattcaagtgtattattttgtgaaataatgatgaatcctttacccattaccttagaatgagtctcatcaactatccagatagtatagttatagggacatggagaataactactaatcaaagtaaaatctccattcatgtgatctgaagctcctcagtcaatgatccatgacttttcttttctttactagtgtttagggcatgtcaaaatgacctctttgagtcactaaagcaatagaacctttttttgcagttaccatagactattgaagcagtttttgaagaacctccatttgttctttgatgaatggagatgaattagaatttacctcagcttgttgatggttaaaggttgtgttgcctctgccttccttgctttttgaactgtctggattctgaatattttccatgaatgatctagcatgtttccttggtgtggcctggtcttttgcaatgatcacaccaagggcggtttttcttttgtggtggttgaggttggtttcctcttgctgccattgtcaagctctaaatggatggaactgagatggatgttcccagcatgagtttcctcctgctttcttccattctcacttctgagaagacttcctaaattttgggaagtggttttgttccaaggatccttccacgaacttcatcaagatcctattttagtcccaataggaacttctaaatcccatctttttccaccaactccttatacttcttcttatcttctgtacaacaccatgaaacttcttcatatatgtccagttgctgccaatgtctatagagtatgttaaaacacttagtaacagaggactctccccgtcgaagtcatgaagtataatttttatctcaaaaatagcaaatatgtttgttgtccatgtttgagtacatttccttcactgcatcccatatcttttgcagtgtcatagaacatgaaattttcaccaatttcatctgtcatggtgttgagtagccatgaaattaattgattgttctcaagtttccatttctgaacatttttgtgtcccatttcttaggacactatggatgtcctatgatgtagccttcccttcctattcctggaaaaaagatcttggtcgagcttacccattgggtacagttctaaccattcagtttatggctagtgatgaggtgagtaaggccatcgtgtgagctagttggaaattatccagtcttcaccgtgagcgattcatcagatttttggtctcccatggcttggcggcgctaggtttagggatggttcagatcgagctctgataccatgcagaaaataggttttattttccttgaatctgtgaatggtacatggaaggtatatatagaatgcacatgacagaaataagagcagtaatctagcctagaaatcaggggaattgatttctctataaatgctaattctaaatatggtaaagatagaaatgataataaacatgtacataaaatcttaacaagttgtacaaatagaatctgttgattctgtgttgatcttcaacacattaattctagggtattttattttagggggaaattactaagggaagtgtattagtaatatgggtgagtggaaacaacaaatgtcaaagacaaaacgtgagaaaaacacgcctttgtgagagggaagcgtccttgtgcaaaacacaaagtgaagaggcgttgtttttgtttgaatttcatatcacaggcaaggattcgctccaagaaccacaattgtgccacattgctcatccacaattgcgattgtgacaattgttcccttaaactgttgcgcaacagggctagtcgtcacgctagaggaccgctctaccacaatcgtggccgcaacatctgcgattaactattattacttttccaacacactattataggatgaattttatgttgagtctcactaaataaattgggtccattttctatgtagtgtgactcactgactcacaccaaagtcacccaaggatattattgaaaagaatgtgttggtgacattcctcatatgaatagagcaattctagcaaagcacaatgccttgttgaaaataaagacatggttgtactaatcacacaaccatatacacatgtaaccttttactttttaatacatggtaatggaactatctgaatggattaatctattcctatataaattttttacaacaatttttacaatgtatttaagagataagagaagacacaaacctgtgagtgaaataagttgggtgatatgatagagatatttagagaaaaaatgaattgcatatggcaaaagcaatataattgatcattgattacgacttgtttagatattagaagaacttttgagagtctctatcgaaaatatagaactttttcagtagagaaactttaataatttcttctagcattgtacccaaatagacttttaatcttgacgtttacaacacaaacatgaactaagactaaaagcgggggtggattctcactggtaaaaatttccaccatcaaaattccatgctcctttttttattatttagattttcacttatttgattttaatttaagggttataatttcactggatagaaatgtaaccagaaaattcaaatccaactcacactagtcatcacctctaaatattcaatagccaaatgatgatatcacaagagtgaacatgatttcattcaaaaccttaaaagacataatatggaattaccaatttttttacttcaataaaatactgtcttcttttttttatacagaagaactcaaaagaaaaatggggacaatcttcataaccctacaccttcaaaaggatacaattttcagaagtgtagaagacatcttagtgactttccagtggtcaaaagatcaaaagccttgtttatctcctcgaaaggaagctcgtgagtgataaaatcatctaacttcaccacctaaattcaggccacgagaaacgagcgttgattaattaacctattcattggcttcaattatttgaacaataattcaagaaaaagaataatttggatgcagtcattgtacatgttcatttatcaactgatattgtaacattggttatagcataatagaaacaacataaaaaggtaaacagcttaaaaaaaatgtagtttcgtacgagatatctcaaaatgtaaaatttgcaaatttaacaccctggatagtctgatatataagcccgacaatcattaagataaattctaacatcatcttaaaatttaggtttgcacttaatccaaaaaaatgtagcttatgagatatggatggtctccttcttatatagattattttgacaatatcatccgtcaatgcaaaatctctaataagagtttgattttgatatgttataagtgttaagatatttaaattatcaattaataagataatatcataagtatgatttttaaaataattgttatatttttttaaaattttataaaaggttatataagatactcattttttgaaaagaataaatgtaaattcagatggaatggtagtcgttactccattcatgcattcttttgcaaaatgtggcaattgactcttccctttgatgcctccaaaatttgatcctactattctgcgaccatggaacaactccattgggtggatgggaagcatttttggtgatagatgaatccctactagcacagtcaatccccaaccctgcatcatcataaaaatatcaaaattataacttgcttaaacaatgtagggtttccctcatgaagccttgatgatcgaaattatccatatcattttactttgtggtgagaaaagaagcaatgtttgtgaataaatattgcaatttgcgacatcaggattttaaaaaatgttttgcatctataattgtgactgcaacaccaaggtttttagattttttcaactataatattgcagtcacattaatcacatttttgcaattttttgtaattctaagaagtaaagaatgctgagacttcaattgtgaacaattacaatttaaaatcttagcaacatttttaacaaagaaccaaaaagcagcaacatgagtatatatacctcatgagcagacaagaaggcatcccttagaacgttcaaatttccagcacattcaaaactgtagtgcacgcccccaccagtcatttgcccgattctctgccaaaaaatatgtttaccatttttgtagtgaaaattaatgcatataaagatgatgtattcttatatgaaatgagatgaatagatagggaacagagaattccaacctcatatactggcctctcatcatcccttggatttataaagtcggtgatacccatttctcgggcttcagtgtacatataaatgtgtcatgcatttactcatatatgacattagcattttatatattataacatagttttattaaaaagatgaagttcatgtaaagctatattggttttaactttatgattaaaaaaaaaaagagtatagaagaaaaaaagagcaaattaagagaaattacagatacatgcatgagagagaaaattacctttgatgaatttttctgagttgatgtcaacgcctattattctggatgcacctctagctcgtgccccttcagctacctgtgccaatttaagatgcagggatttacaacagttttcttttctttcaatacaaattattttcataatactttgggtgagtaaaagaaagaaaaaaatactgtcttttgatcttatttataaaaaataagttgtagcgtaaaatacattccaacttatttcttataaataagaccagagataatgagtttgtgtaattgtgtaaatttatttcttaaaaaaaacacttactttaataaaataattagttttttattttctcaatctatttgtctaaattaattgtttccactttaaaataaagttattttcctgcttatttaaataagaaaattctatatatatatatatatatatattctttattaaaaaaaacctttttctaataagcatttatttaaaaaaaattaaacaaactagtttagtatatgataattgatatattgaatacatctataaccttacaagaatcaaaataaaaaactaaaaaacaaaaattaatataatcataactaagaacacattttaacgttaaaataaagagaaaaaagataagcaaaaaagttgaagaaagaaattggttttaattattttccttgcaaacatcactacaaaaaataacttattccacgggattctacattagttatataataaccaagtggtataaggcatggtggcattttttgaaaaatttattacattaattatattacttaatagacatagaatagtcatttttattacatcagctcttatttaagccaatataaaaaatgatattttgtatcggttcaaatactaagtaattattttttagacttacaaatttgaactccttttcactctcgccttaatcacttctccttaaatcctctcattctcttcctggtatcacaccaccaaataccacatctcattttcatcaccaccaccacacatcatattgcaccaccatcacgcaccacattgtgccctccattgtcggtgctactagttgtgtcaccaatactagtatgttttcatttttctctctttcatgttatgtctgcatagtgtcatttcagcactcgatgcaaaaagtctcactttcatgtcacattttgtttttttttactacacaggcaccaatatgcttgattgtcgttgcgccaattaaacaatgcggtgcactcataaaatttggactgatcacgaaccagtggtctaaccgaatcaggtcaatcatcaaaccgatagtgcagtcaaattgtttcgaccgattgacccaacaaggctagataagcaacttggtgtggttaaactggtaaccaattgacctggactaggtcatgcaattttgttgaaattacttaaaacgacatcattttaacattaatgactaaaaaacaaagaaaagaaaaggtcaatagcttggatttgattgtctcactccttcgaaatccttaaaggttctaagtccttactcttcaccatcaacaaaattacctcccaccatcatcaatgtcgcccactatcttcgtcgaacctttgttatatccatttccttttgtttacaagcatgctagtatgttgtcaaacattttttctttattatatgttcccttttagttgcacatttcactttgttgttgcaatgtgattgttgatttggtttttatattatttgttcaatatgatgtggtaattttaggagtgtttatgcttaattgttttatgtacttaacactgcaattctgtttgagtagtgatatttttaggtcttttttaagataaatattaaaatttcatatactttttagtacaaactagatcatatggatcaattagttattcactactttaattattaacacagtaactcaacttgatcagtcatcatattgattttcaaaaaattatatatggttgcacttactctaaaagcacttctctaatttaaaaattactttcggaaatagtggccaatagtaatgaaagatttcacttacagcgagacccacaacacctaaaccaaagaccgctacagttgaaccaaaatgcacattagcggtattccaagcagccccaacacctacacatggcacacatcatcaatttggtctaaacaactcatgctcaactgataacatgttcactattgttacaatcgttcacacaacatgattatttaaggatcgtcgatttaacactcagcaaaacatatatgattagttaaatggaatcaaaagtactcaataaatataaatgacaaatgcacgttcaatttgtgggaaagtttctgatatcgattctcataaaatatatttttagagagaagaaaaaaaaattaagtgtcattattatacaatatgatttttagcaacattttttttctaatacttgataaaaatgttaaagttttttacaacctttagaaaatgtagccaaatatgaatatatattattaatatattttcacaacattttatcaaatattatatataatccaggtcaactacctttgtcattctctatatccaccatttgatgtcaacaaaataagaaatataagattgatctacttgtgaaaggaaaagatatataaatttaaatcatttgttaacaaattaacaatactaataagtagcatttgcatataaataaaatatcaacaaaatcatcgatgaacatgtctaaatgtgtccaaatcaatgaagcaagatcctatttagcactatccatccctctccatcctctctatgtctttttttttcctctatctctatctctgtatctttaacttaagcaccgcacttctatattctttcttctctcctctttatatgtttttgcaggcagaaaagtcagagagaatccattttccaaacctactccctaaaactgaacttcttgaacgttctctactttgactgtcctcccaaactaggaatgaccaatggatgaattggaaaaattcttagtcggattgtaatgaattggagtaaaataagagaaaataggttaattatacattcatatgtaaaatattttacacaatcatataatcaaaatctattatatataataaatttattaattttaaaataattattttaaagtaattcaaacaataattttaattaataataatataaaatgattttatattatcactgcacatacattaaactcttaaaataatccattaattcattttgatcaatttaaaattcatttagaaaatctaattcatccattgtcgatctatagaatcccatctaatctatcaattaacaactttttaatgaatgaatatccaattcatccaaaaaattaatatattttaattaaataatttttatttatcaaacattctgtctccgctctatctcttctttctctcccctcttcgtgaatttaaggttggatgaggaataagatccaattaattcatactagttcatgaaaactgaatgggcaaaaacaagggagggaaagagtgtgtgataaaatacaataccttttaatgtatctttacgcaaatctacgaaagattttaaaaagctttatctctatgtatgtgactctgtgtgtaacgtatataaggaataaattatatataataaacaatactacttattaacatcgaagcaaaaatcaatactacttaaaatattttcttaacaatagaaaggcttggttgaatggatagcatgctgatacttggatcttcaaaaaccttaataattccgctacttttttcttaaaaaaagtactgattctctagggtgcccctcatgtcagaattatgacactgaccatttcaattatggtgaattgattttttatttaatttattaaaggttagttagatgatccattgagaaataaaataaaagaaaatagattgttattcattcatttaatttaaagtaaattacactaattatcttcaaaattttgtaaattacgcaaattctcaatatattttcttacccctacatcaatgtaatgtttgagatggagactgaaaattgaagtaaaaattactaatttgttgttgctgaatttcagattataggagattatcttccttggatttgatacttttacccattttcatgatactaattaaactttttcagcatttcttaagattgtaggggcgggtaaactttgacaaattttctagggtccctgtttaatatttttcttttttagaaaacggggccctcaattggcaatttaaaaataaataaatgtaaaagtagtaaaaattgttgatggtgagaattgaacttaccgtctcctctagttttcaatattgaacataggttgcagtaattaatatttgaggccctttatttttggggtcctgtgcggttgggcaccttacatgggtccagaaccgccccagcattttaattcatgaatagacctttaagattgtatgtttatgcttaatattttttaatggttgtgttttacctgcctgaatctcctaggtggcttgtaagcaaaggtcgatcgaatacctaaggctaaaaaaatttcctaatcgtattcacattctttgcatttttatagaactccctttgcttctcaacaaaaagaaaacatccttgtaaattgtaattttagcatgctgcagcatgcactcactcttttttaatgtcaatgatatacacacacacatgttatggagaggtttaaaaggttagaattgttttcaaaaagtgctttgcaataaggcaaacaaattttgttatgtcctaaacacctgagtttcttgtaaaattaatagattaaaatattttatctttaatagtaacgatcaatctgacatgagcaattgaaaccattaaagcgcccaatcaatccatatatccataggagcactaaccacttctgcacttcatatatatcaaaattttaaaattttaattgttctcctgactttcacccaagcccaatagaatagaaaatcatctcacagttggaatcaatagcaccgaattaatgcttatgtatttttattgttcctaaaatgagtataaggatgaattgacatctggagcagtgaagaacatgcatgctttgttgaatataatgctttaagggttcaggcggaaacattatatgctttaagggtacataaaattagaagagggtctttactatttctttagttctttatgtcttaaaattttaatttaccttttaattatttgcgtctaacgcatcatttattgtgtacttgttccagtacaagattcgactatcaaatattagtaccttattcgacagtactggcaaagcaattaagaggcatatgcacactgcaacacatatgtaatttatactaatattttttccctaaaatttattaaaaatatttttaaaaacctttgataatatttaaaaaatatttacaattataaataaatattattaacttccttttatgtaattttatcttgtatataatttatgtcactaaagatttacaagaattttatttatatgatctatatattatatttgataaactatcaccaaaaaatatattagtaacacttatttatatttgataatatttttaaaatgttatgaaaagtttttaacaatatttttaataaatattaaaaaaatgttgttaaacattaggtgggtataaatgatccaacaacgtggatatttaagaatgtatcccacgggtgacacaaggggaatttaaaaataaaaaagagaaaggatacgttcacttttttctttcacggaccacatttacttttgctttcagtaatatattacacctaatatagtttagaaatgcaaaatctaactacttatatggaactgaatgctgactagtaagcataaaatatgaataacataaataataatgttaaggtggatatgtggatatacgaagatggataagataagaaatatggatattcgaagaaagatgttagtgataccggtacatgataagatgagggagtatagattgaggtggtttgggcacgttatgatacagtcacttgatgctcccgtaaaaacaagagtttattaccaagagctcaacacaaagaggtagaagtcaaccgaaactttcttgggaaaagataattaaataagacctaatggagtggggtataaattgacgggatatgtcttagaacggagtgaagaaaagttataagtttggtggagggttaaactcattagtagttgtatgttcccgttattcccttgttttaattattttcctctttttttctctcttcttcctttcactccttttcctctcttttatcttatttttacttttttttcttcttccctttcactttctttttgtatctcatttataatttatcactgagttcatctactaccgacccaattaacttgggttaaaggtattgttaatattcatatcgttatcgttgtagtattatcataaagttttttcatcatccaaatgtgtcttgatgtgtatgagatgacgaatataataattgggctgcaatcatatataatagggacaatatacaggagaaaatggaattatgaaaattgacatttaggaatttttatcgataaatattaatttaaaaaaattgtcatttctttttcttgcatctttttcttaactagtgaatcaattttatatctacaattgacatcaccaattttgtatctccaattgacaaatagggtaggtatgatgattaggaaagtgacattatggagagggtcatgggtggaattatgtaagggtagaaacttttaagccgatgtttatttacattcacatgtaatttgttattgtctgcaactgctagcacgccttgtgactcggtatttatttgtttgccttgcaaaaataccctaaagttctttcagactttttaattgagaatgatctatatataaaagtaaaacagacttcaagataagtatttaatattaacttaatcttaacttcagtttatatttgttttaatattgttgtctctattcaattgttttcaattaattgttccatttaataaattattggaaagtaaatttaacttataatatatttatagtaattaattaatataatataaaattaacttaaaggatattattatatattatatttcttaaataaaatatattcttaatataattaataaatattaattataattatagtatatgaatcatgatattcattgattacgatgtatttgttaaatttaaataaaaagtaactattatataaaaataatacctatatatatacatatattttactattattattattattattcttgtttaaaagagttattttaagagacaaatttgaaattttataaaagagaggtgaaaattaaaacgcattattatttagaagaagaaaaaaaaaagatgaaatacaaattaaattatcttcaagtaaaattttcattatttgttatggtgagtgcattttccaaaaatctcctttccagtgaataagaaaacatgatccagctgaaatctcgtgatacacgtggagtggtgggctagctgtggtcctcaattaattaagtggtggcggagcgggggatatgattaacaatctaataggatggatccaaaaaaaacatatttgaatataaactacgtaggcataaataattgtatatgattattgattactggccaatggattaggttaattaggtgaaacttttttatttaaatttcaaaagagaaaactttagcccagaaaaatttcttaaagtacttctaaaagtacaaataaattaggtaaaaacccaataatttgtaaagctgaatgagtaaaatactaacataaaaattaaatacagtgaattatcatgtagatgcatatattttatttaataagcaataaacatgcacataatattaagctcgtaatatcttaaattattgaggttgaccaagttccttacccgaagatactccacaactgagtaaggtgagtcttttgatgtggcggttgaggtcaccatcattaccatcaacgtgaatcttgacgacgcatgctgaatccaccaccgtgtactctgtgaaagttgaagtgttcaagaaatggaagatgggttttccatccattgtagaaaaccttgtggcaccatcacaagccatcaccttcttcataggatccaccccaaatctctcacacttgttggttttctcacacttgcaatatttgcaatccccacattccccattgaagattggcaccaccaagtccccttctttcatgtcacttacaccttcacccacactctccacaatcctaaaaaaatattattacacccccaaacacaatcacaagtgctcacttcaattcaatttcatataatagaacatatgtttttatgtacaattaaatgaacttctctattataagaggggaaataaaaataaaaatgtaatatgaattgagtttcttacaaaaattgaaattattttatgcagataacttttataaaaactctctttattttattttattaaaagctctttggatttcttcaaaggttttccatttatattatcaccttgtgtaaagagggtctaaatcattaattttataatttgtcatatatgagtttcttgagatgtatgagacccatgatatgcgcaactaattagtatgtaatatgttttgcgtttagtttcataaaacttcggggagaatatatcgacgaattgatgtttttcttatttatattgcagggaacaatacattcctctatttatatttccaaattcatggcttgaaataaagtaaaagaagaataaggggtcctacccggaagcttcatggccgaaaatccgaggataagcgtgtggagcctcactctttggtgtcccctaaaagaaggaaaataagaagcatcaataaaacaatatatattagataattatgattgactatgaaattcactttttcttaattagacatatatataattataattataataaaatattaatcacatataaataatgtgttaaaaattaagattgaatcataagatattatttaagtttaatttttagtaaaagtggtttttaatcaagttattaataagggcataattgacataaggggtgaatcaatattttatcctatcctttaaattttggattaatcaagattatttttttataataaactgaaggatcaaaaccaaaatatacatatttataaacatacctcgccttgccaagcagtgagatcggtgtggcagattgtggtgaagaggatcttgattcgaacctccattttctgaggaggatggacaagaacacgttccaccacaaagggttctccaggaccatatgccacggcagcttcatgatggtgaatattgaggataataattttatcaataataataataatattgagctacgaggaatgagatagaatttggtgtgcattctttgcgagagtatgatctgaataatatatagatcgaattttggtgatacgtacctttgcaagtaatggtgtttcccctggtattatttggattcaagttcccattagcgacaaccactggacctgccatttatcttcctgagttgttcagtgatactttttgcgcgcctgtgttttgcttcgtgtggagccagagaatacaacaaaagcaaatttgtgatgatataaatgaacgaaggcagctatatataaaatctttctctctgatcgagaactgagacttacacctgcttttaagcatgcatcacgggccaggctagcaaataaaaaattattatattgttttgatttttgggaaattaatatttgctttgtaattgtattagtttattaatttgacttattgtcagtaattggattttctcgataaatctattacaggaatatggattaatacggacggctttagctgtcaaaactatggattctatataatttaccaatactttttctagtctttattataacgtactgaatatcaatgacacaaactattaaaagtaattgactccgttgattttattaaattttaaaatttatgttactaattctttattaataattattaactttttctatcaaaaattaatcatttactattaaaaattaatcatctagggtgattgaaaacactaaaaaaacaatcatttacaaatatcgtttttatatttttattttttaattgaatcttataacaagaattaagtcacactttcaacttacactttcaacttaaactttataatataaattgaaagtgatatttttttagtaaattatagcaacaattctcgtaagtcacactttcaacttaaacattataatataaattgaaagtgatattttttttagtaaattatagtaacaattctcgtagaagtgatagtgcatataagcagatgttagtgttatatttttaaacataaaggagtttcagtgttgttaacatagaagagatatagtggagaaaaagaaaagggtatagaatttcgtaagagtcaagtctctacaatacaaaacacaatcgggtaatatatatatatatatatatatatatatatatatataaataacataaattaccctgaattaattaatatatctaatattatttaatacttcctctcaaactcgtgatgcattagtacaaagagagtttctcagtcaaaaaataaaaatgtttaatagaatatttttatgaataagtaagcaatatgcataactgaaaaaacaaaagacaaagttattgtgtcatgttgaagatgatgacaatcaattttaatatggtttgtacggtcttgaagaccgagtcatggacaatttggatgatattcatgttgtcacaatacataagagtgagtccaaagagagaaacactcatgttaaagagtagccaaacacaactaaattacctttgtagtgatagaagtcatgatgaatacgatattcaacttttgtagaagatagagagacagtgttttgtttcttaattttgtaagaaataagagagtctactagaataattcaaaaacatgtagtagacttacaattagtggtgtcatcagaccaatcgacatcagagtaatactataaaattaagtacctcaaatatatttaaaaatgcgaaaaacagttacccactaccttgtaataggagaaataacaaattcatttacaacatgcacaacactgtatgaaatatatagtgcttatcttgaatttaaattatgtctacttacatcaaaacactattgaagtaaaaaagaaacactttgaaacacaattttttagaagtgtagaagacatctcagcgactttccggcggtaaaaagatcaaaggccttgtttatctcctcgatttgaaactcgtgagtgataaaatcatctaacttcaccacgtaagttcaagccaccaaaaataggcattgattaatatcactacaatagctatagcaaataattcgagaaaaagaaaattgttagagcaataattcgagaaaaagaaaattgttggagcagtctttgtacctatgcttttatcaatcgatagaatacttgtcacattggttattaatgtagggatagacaacataaaagagttaaatagctaggttcgtttcggtattctaaaagaaaaattgtatatgtttttaacaatattattgatagatataaaatataacttctatcttctatatgtgtataagagatttacattatcatctaataagataatatcttacgtacaattttcaaaataataattataaaaattaattattttcaataatataacaacctataaattattgattatttaaaaaaaattgttaactatttacttagttctcataattatgtcaattttaagttttagtctctattttaaaaaaatagtttctactcaattatttgttccagtttaagtttttatagcacttatacaccgtcaaagaattagaaaccaaaatttaacttttatgtatacatttaaaaaaaaaaaacttgcatagggactaaaacttgaatgagaactataagaactaaatcaataatttaacttacaaaatttacattataaaaaatgtatttgatttttattagattttaaattttattcaattttagaaaaggttatatgagggattccttttgtgaaataagtagtgaattgaaccctaaatgtaatagcttgaatttttaaacatatgtttaagcctggattaagcacatgttaagcttaggattaagcttataaatgaggagatattattaggccttggaattccttgaaaggaggcttaaacgcttgagaaagagtggaaataggctattctggcctgcggcgcaacccacgtgaagtgcggtgcgacccgcgccagatgtgcatatatgccaatgctgtctggcctcccaagtgggtagcgtgaagtgcggcgcgagtagcgtgggaagtggcttagaaatggcattttctttctgccagcccaagtgggtagcgtgggagtccacgcgagtagcgcgggaactgctccagaaagtctgttttgcactggaacatggcgcgagtagcgtgggacatggcacgactagcgtgggaacgtcggcagaatcagaatttaaaggccaggacgcgaaagggaaggagaaaatcagcctttcttcttcctcttgcctccacacctccattgatgacctcccaagcttttagggaccttatcttctagcctaaacactttcttgagacttataacctttattgaaccgattagaacgctgaaatccttcgtccttttctttgaaaccccaatctaagtgagaaaaggaacctcagagggaaaagctccgagaactcgagcttggcgcagacccatcgcgtgattgggacacaggagcttaggaaagccgtcctgaggcggttggagtcgccactgaggtaagaatcacggatttcaccgtttgattttcgaattgggggtttctgtgaatagtgacccgtttgtgttgggctagaattagcccagggtccagttgagaaacttgtttaggacgatgaatagatgaaggattagctttcaatttttgattctgatgattatggattttggctctgtgttacctgtgtggcctgtgttatggtcacttatcctggtcatctgatataccagagccttatatgtatgttgtattgagccaggtttggctattggaatggtgtcttgagtgagacttggaccattccagagatgttggtatccttatgctgaggaaagcttatgccttgtatatgttgtattttgagtctgtgatgactcaaatggcttgtaattagccttgagagaccttgtgtggtctgagagaagcctaatgataggctagacttgtactgaaccctatgataggggaattatgctatgtttgaagctgtgattgatgcctgtggtctaaatgttgatatgagctatgtatgccttgtataggcgttgattctgagtttactggtggcgggagccatagagcaaggaccagaccacagagtgatattgttccaggtaagttcagtgtccctggggatgattcccatcttgtgtgccacaccacactcctggggagttgtggtcatgtcataatacatgcattgcatttgcattctggtgctgatgacatatatgcctctgaacttgatgtatgctggttatatgctaaggtatgattgttttatggactgtgattgtgcttgagatagatctattggccaatagatagatatggacctccctaggagatggtttcctcctagtatgcctggctcttgggtgatgatgatcccggggtgatgatgatcccctaagccaagggaatagttcagatggtttcctgctattctcggaggtaccatatgtgtacatccccgttaagggtagcgtccgatgggatgacgcaggtgtgagttccgacctcacactgggagatggtttcctcccattccaggagatggtttcctcctgctttgtgatggatataggagatggtttcctcctatttggtgacttgattacaggagatggtttcctcctgctctgagatgtgtagtcaccttgtatgatatgctgtgtgattgagaaagccagagggctaggccagtgggccatttgattgtgatgtttgtgtatatgtattgtgatagtgggccaggatggaagagattcctccatggatcctgagcttactgagatatgttatctcaccccgtgtggggttatgtggtttcaggtgaaccatcaggaagagaagagcagtctcaggacaagaggcccatcagagactagactgctttgctgaggagcaatatagagagcatgaaggctccattttgattatgttttgagtttagttctgtataccccttctgagggattatattcttttgtagcaccgtgtgtggtgtgaacctgagatgtatatattatacagaactttgatattatgtatacgagactttccctgagtacatgtatatgtttatattgtagttactctgcctaaagctctgttatctgtcttatttatgttgttttgataaactggatcagcaggggcgtgattttatggttctgttatgtgattccatacataatgtatcaagaaaacgatcatatgtttccgctgaactattttaattatgttttatacgcttatctgatattattaatgataaacagtcggaggcctacggggtgttacactaaagaacacatgtaaattcagagaatggtagtccttactccatccatgcattctttggcaaaatgtggcaattgagtcttccctttgaagcctccaaaaactgatccttctattctgcgaccctggaacaactccattgggtgaatgggaagcaattttggtgatggatgaatccctaatgtcacagtcaatccccaaccctgcattattataaggatatcaaaagtttcaactgtaattatagccacaataatgataattctgcaatttttctagcttaatgcaaaggaatgctaactatatatatacgagattccaattttgacgaatctacaatttaaaatcttagcaacatattataacattaaacccaaaaaaaaaatagctacatgaatatatataccatatgagctgacaagaaggcatcccttataacgtttgaatttccaacacattcaaaactatagtgcacacccccactagtcatttctctgatcctctggaaaaagaaaaaaaaaatagtttacattttgctagctagtgaaaattaatgcgtataaagatgatattttctttcttgaaatgatatgaatagatagagaacagaaattccgacctcatatactggcttctcatcatcccttggatttatgaagtcagtgatgcccattgctcgggctttgagtgtacgtataaaatgtatcatataacacattagcattttatattaaaacgaatttatattaaattaaaagacgaagttcatgtaattttataaggttttacttaatgattttcagaacaattataaacaaataaaagagcagagtgcaatcaaagatatacatgagagaaaattacctttgatgaatttgtcagagttgatgtccacgcctattattttggaagcacctctggctcgtgccccttttgctacctgtgccaatttaatatgtaggacttaacgacatttttctttgtaattgtaatttcagattttagagagtgaaaattaaagaaaaatattttacaaaaagactgaaagcaaaattcattaattttatagagaccaaaaaccgtgatttcaaattttttaggtataaagaattacaaaaaatacagtattcaaaatgaaaactcactgattttatagagactagaatatatttaagatattcaaaaattactttctgaaaaacaattccaatcgaaaatgaaaaaaatcatatcttatattactgcctaatacaacttgtgttttttttcaataaaaaatttttggtctcacgattaaaaaatatagaaatttagtcccttaattttcaaaaattagaaaatgtggtcctaccagtgtgttaaagattaaattacttacattgaccgtgtcttaaataacatgttaattagtataacaattatattttttggatttattaattgatgtctaaatttcaatttaataaataagtatttaataaattattaattttctaattaatgtttaattagtttgcaaaatcatggccataaaaaataagcaaataaaatcatgataactaaaaaaagctaataattaagcttaaatattttttgcctgtatgttaggactttttttatttgtctttaaaaaaaagttagtcattataaaatatatttattttatttttcatcgttaaaatactttaaataacatattttactattcaaaacatattttattgttcagagtgttatttaaaacaaaaaaaaaaaatcaaacatattttataaatactaaaaaaaaattgtaaaaatcaaacatattttataaataataaaaaattgtaaagatgaaaatgaaaaaaatgttaaaataaaggaaagaaaaaaataattaaacttaataattaaatgtcacgtaagataaattgtgctagccggagttcaacataaaaacctttaaaaatcaaaacacttggaccaaatttttaattgaaatcaagagaccgaaatagatatctttgttttttactaagaggacccaaattataaattagaaaataaaaagaatgaaaatatgttttaagcattattttaattgcagtgaataaatgggctataatgaaatatttcacttacagagagacccacggtacctaaaccaaagacagctacagttgaaccaaaatgcacatcagctacattccaagcagccccaacacctacacatgatatgcattatctatttggtctaaactcttaaacaactcatgctcatttgatcacgtcgttcactattgtcacaatagttagatgcatgatccggttatattttaaatgtatagtaaaatttgaagcttgtaatattttaaattattgaggttgaccaagtttcttacccgtagatacgccacaactgagtaaggtgagtcttttgatgtggcgattaaggtcaccaatatcatcaacgtgaatcttgacgacacatgctgaatccaccaccgtgtattctgtgaaagttgaagtgttcaagaaatggaagatgggttttccatcagttgtagaaaaccttgtggcaccatcactagccatcaccttcttcataggattcaccccaaatctctcacatatgttggtcttctcgcacttgcaatattcacaatccccacattccccattgaagattggcaccaccaagtccccttctttcacgtcacttacaccttcgcccacactctccacaatcctaaaaattcattgcacacacaaatatccaaaggtgttctcacttcaattcaatttcatgtgatagaacttatatttttatgtacaatcaagatattgttaagataaaagtctccaaaagttgaaaaaaaaatatcagataaaatagagttttttttttttttttgcataaactaaaatcaatttatataattgacttttatagaaactcaaaagctctcaatttattgtacgtgtcttcttatccaaatcattaatgttataatttgtcatagttgtaaggatatttttgtaacctacccggaagcttcatggccgaaaatccgaggataagcacgttgagcctcgttcttaatttggtgccccataaaagaaggaaaataagaaacatcaataaacaatatattagatataacttatgtttgactatcaaatttacttgttaatgatatttaattagacatattatactacaaaaaatattagtatttccgacgaaaaatatttcgtcgataactcaagtatttctgatgaaaaatatttcgagcaaaatatttgaagtgtatatatatacctcgccttgccaagaactgagatcggtgccgcagattgtggtgaagaggatcttgattcgaacctccattttctgaggaggatggacaagaacacgttccaccacaaagggctctctaggaccatatgccacggcagcttcatcatcataataataataataataataatatttgttcgcattctttgcgattgcatgatctgaataaataatatagaattttggtgcaatgtaatgtacctttgcaagcaatggtctttcccctggtatcgtttcgattcaagttcccattagtaacaacaactggacctaccatcttctttagttgttcaacgattctttagtggttattttgtgtatattgtatatggtgcttttagcatgagccagagcatacaacaaagaaaacttgtgatataaatgaatgaagggccagctatataatatagagttttctgagactagcacgcagcacgtgtccagcatatggcacgtgttatcaatttatcttaaatattaaaggaaaatgcttgtagcggagacagcaatacaataaaaaaaacttgtgatataaatgaacgaaggacaagttatataggcaagtttatttaaatttttttgttgaaaaaaatatttaatttaataaaataaatattttttattttttaatatggttttttgaattatttttattttaaaaatattgttttacttattttaagaaataaatcatatttatttcttaaaaaatgttttatataaaaagtgtttattttaaattattttttataagtttaaataaattcagtaagaattttctccatgagactaacatgtgcatttagcatatgacaagtgtttagcatatgacacgcgttatcaatttatcttaaatattacaggaaaaaaagagttatgttgttttgaattttggggaaataaatatttgttttgtattagtttattatatttttagttacggtcgggaattggattttctcgacaaatccattataagaaatatcatgtatatttaatggataaacactacggaccgctaaaaccgtctatgaattttacaaaaaaaaaaaaaaatatatatatatatatatatatatatataaacattgcttgcattgagattatgcatattttctaactttttaggatcaagattaattacgctcataataaataattgttattgatgtttatttataattaataataagaattatcttatttgatatatacatttcattaaacaactttattcgtaaattatttcataaatttcaattttcttttaaattacattaatttccactatttttatattattagttttttaatttatcatttttattaattatatttaacttctatttttttattatttaaaaatttagagagaaaataaacatttttttatttttaaaattatttttctttaaaaataatttttacttatttttagaagtaaattctatctaaattgtatctgtttgttaaaaatactcttattttaattttttttaaaaaaataaagaaactcacccaaatcttagagttttctccgagactaacgcgtgcttctagcatacaacacgtgttatcaatttatcttaaatcgaaaagaggctattccttaaccttttagcttatgttaaaccgggagtgaagtgacccgtgaggtacgttgttttgaattttgggaaataaatgtttgttttgtattacttaattaattttgacttatggtcaggaattggattttctcgacatacccattataagaaatatcatgtatatttaaaggatttacacggaccgcaaaagccgtctatgtattttgtagaatttttttttgtatcagtacgagaaatcatgagtcacgttgaatctatttgatcaaagataaattttatttttgatatattatttgtaaaagaaaattttacacgtaataaaattttgaacataaactctctcttttgtttcaacaatatgaaaacaacgatattttgtactatatactatcgtgtcaatcatttagaataaattttatagaatctatcaaataaagatttttttagtttagatatatttttaattcctcaatcttgattacggttatgtattgatcttttatattttaattttttagttatttaattttcaaaagtaatagtttagtcccttttagctgattttttccggtatgaaagaataaaagaataaaattttgaattattttgagaaactaaaacaatatatctcaaatctgacgaaaaacataatttttttttattagtagagttatcggtaaatcttgcatgtttttaccctaaaatttaaggttgaatttatcaacaacttggccgttgttaattttaccgccattcaaataaacaaattacatataaatatactggcgaaatattttggcaatttgatattgtttatagattttttatattgttttccctttattagcaagaaaatttggttgaaagtgataaaatttactccggttatctttacattttaagggtagaagtattcaacaaaatcaaaatgattagatgcgataattttttctttaaatccaattcaattcaatccgtgaacattcctattctacgattagtttcatgactttcggctacgggatacttttcttctagttaaaaaatctgtcggtaagtgattcttggaatttctacgatgatttctccttctggtagattagtcattcgtaagggtcttttattcctttgaagcatagaaatgatgattccgacgaaaaggaggggcaaaaggaagtgaaaggaaacacgagaaaaatagagtaaaaaatatgataaaaaagggcaaaaaatctaaaataatatttttttaaaattacgaatttgagactgtttttaaaactatttatactcatgcgacagttaatcacttccaaaataggcataattgaacacgtccagattagacgtaactcaaggggatgtacattattctaacaaatctacctcaatcaaagtaattaagagtcattgaggtctaaattgttgacgtatacttgaattagaaaattaatgaacatacttaaagggaaaaaacctatgatcaaaagtttttctttacaattaaggtgtataatagatgaacttagtcatgaaggaaaacacataatattatattttgttgatgaaaacacaatattatataatgagtatatggtgaaaatggtttaaaattggggtttaaaccttaataaagataggatgaaattaagcttttagataagatttaaagaaccccaattataggataaaaattagactaacaaacatgagtataagataaatattaatcttgtcaacatattatatagtaactaagatagattataattttagagctttaagatcatctcctaaagatgaaacaatattaatagaagttaatcttaagaaatccttagtacaagtacccaagagattagacatgaagatataataagtaaactaccagaagattggttaatagaagatgttatgccagaacctaaaatatataatactcagattagagaaattattcaaaaatgtcccaatattaggttaaaaatgaatagatcaacatcattaaaaataaatgagtcacaaatgatatataaagaacaactttcaagacattctattagtgcatccccataatattatcctactagatcacaagtattagagaagattttaatggataacataataaagatgtaagaaattggtttttttaaaacatatagtaaaagacaaacggaagaatttagacaagaatattataaacatctagaagaaatagaaataaacatattattttttgattggtttttccataaaaagaaaaataaatttatccaataaccaagaataatataaaatgaaaaactatggataataaaatcttagaaccgaatatccaccccaacatggagttagaatacaaatatcagatctagaggtagaagcatcaccttttaaaaataaaaatattacatggaaagataagtctatagagaaaaaagacattaaaaagttacatcaacaattaaattattttaatataatgttaaatattatgtcaatacatttgactagaatagaaatctaaagtaatgaatctagtacttcagtacaaaattaccaatagtaaaaccctttgataaagcaatatatacaataatgaatgtacctaaaaaagatttagattcaataaaattaggaaatcaaattgacaataagatagaagaaattagaaaaagtttagaaaaattaagtatagaaaaatttactaaaaatattttacaagaagatacaaaaataaataaataaaattaaatcattatcctaaacttagaaattattattcaagtccatcgccagcttatatacaatatgaggaatgttgagattttcgtcaatatgttttctatgaaacatagttagcataatggaatctagatggaatgagtgaaccatccattctagatttaacttgtcaaatgtctatgacgacaattgtctatgaaaccaaaagattaaaggatggtgggacaatatttgcaatgaaaatgatagaaatcttattttaaatagtgtaaacctgaatctcaacaataaagatgtcatatcaacacttatttattctataatacaaaactttatagtaaatacaaatatctttaaataaagaatagcaaatcaattaataactctgtattaattgtccaacaatgtcaaattataggtgatataaagatacatttttatctaaaatgtaagaagatgattttgcttgattgatcatctgatttaagagaggaaaatctttaaaattcaaaataatttattaaatggtatatatatatatatatatatatatatatatatatatatatatatatatatacacacctccccttgccaagcactgagatcggtgtggcagattgtggtgaagaggatcttgattcgaacctccattttctaaggaggatgaacaagaacacgttctaccacaaatggttctccagtaccgtatgccacggcagcttcatgatgatgaatattgatggcaatataataataatattgctttatgaggatgagaaatttggcatgcattatgcgagatttgtggaatatgatctgaacatataatatagaatttttggtgttacgtacctttgcaagtaatataatggtcttttccctggtatcatttgaattcaagctcctaatagcaacctctggaccagccatatctttcttgagttgttcagtgattttaattttttttggtgtttgtctttgtgtgtgtttctccctagcagagagttcaaccgtaaacaacaatgcaattttatgattaaaatgaacaataagcgcagggcctgctatatatttggaattttcttatcactgagaggctagctcatgcgggttgcttttcccatatcacgtgtttaggtatagttaatattaattaaaaaaatattttttattttatatttattattatcacttatcccaattaactggattaaaaaagttgatgttgatgatgtattttatatttattttttaagaaataatgttttgagttttggggaaataaatttttcatatttagttacagtattattttgacttctggtttgaatttggtgttcctcgccaaatcttggatcggctgataattaatttatatttttcgcacttttaacttttaaggtgggcttcctatgtgatgcacggcttcataaaatgggtaaattattgtaatattagttatacaaacatacaaataacagttaaattagtctccaagagtatgatgtgttgaaaaattaatctcttaaaagataaaaaatatataaatttagtttatgaatatacaaaaagtacaataatttatttcgttaaatttgtgagaccattttattattaagatgataataaattatatttttaggactaatttgatattaaattataaaattcatatctatttgtcattaaattatatataagattaatttatcatattttttacacattcaatgatgaaattgaatttttcatctttcaataaccagtttatcaatacctcctacttttagaaaccaatttgattatttacccttataaatataattcaaacactcggtggattctaatataaatcactgcttttacggactcacccatgaaccagtactttttacctatgataacaggtaatttaccggaagaaaataaaaagaaaaaaaattaacaacacaaaagaaaaaaaaatatattttaatagaaaaagatgacctatttattaggttacaggtttcaaattaaaaacaagttatttgttgaatcgatagaaaaatttaattcatttataatttttaatgataaaaaaatctccctcacctttctctctctgtcatctcttctctcctcccttcactatccatctccagctccggcgacacaaacctccatctcctcaagaaaatctccaaactccgacttaacaaagtccatccacattatgaaatgcagaattacatagctgaatcccaccttttccgctgcttgcatactcttagccggtgtgtagagcatgtcatttggtatacccaccatcacctgaatcccagacttcttaagagcatttagaatatcagggtcagcatcaaaaagcttaactttctaaataccattgtccttcagcattttcactacagtggatgcgggcaaagggtgtgttaattgtgtgccccaattaataccaattccactcactaaacccaccaacagtgcaccaaataacataagaacaacgcacctcctaagctttccacaccccatcagatccataaaaaactgaaccaacataaacaccaatagaaaaaaaaaccaaatctatgctcttttgttagagtatatcaaatatgaacctcaaaggtagtttttttattcttgtatttcaacaagtttgtcgttttattctgcaaccagtcatgtgttagaaaattagtatgataatcctggataaattcaaagaatcgtgttcgtacactttccgaacaaagtatttcgaccctattcttgcctgggttcacgaaatccttgttgggataattctttgaagaacaatctgcttctggcaatagagaacagatcaggaatgtagagagaaagtatgattttcgtatatattaaatctgaggccaaatgactccttatataggagttttccaaacaatgcaactcttggcgataaaccatcgtaaccgttggttatcggagcggttgggagtagttatatttctaacctttcccaagagcggttacaagtagttactattttgaattgttaaccgcctcttattcataactcatagagtttaaacaaaactccaacaatcccctggatcccagccaggggcgctgcctcttggaaccccgcaccgtaattgcggtcaattatgcgttggctcaacaagcgtgcactccgcactaccctaacttgtttccaaagcttaacgcgtaatcgcattggcctatagtaaatcacattactactaaaatccattgatgacactaaaatcaccaacaaatcccccccattttagtgtaatccttgatctactcagtataacgatcaaacaaatgcataaatgaaatgtcttgcgattgaatttcatcttagtacaaatacacattccaaatactcaagaatcagggtatcgttacgattgaacccgtcaacctatttgaatatctgaagatattgtacacatatgttttctacaacactctactattcatacttgacactttacaagccatgtgtccttatccattcgtaagcatataggaagccaaatccaaacttcttgaagcggcaaaacttcatgctcacataggtgatccttttaatcttgtaccagcatttacaatttttcaaaagaaccattaagaagatatacttcaacctaaccatcacttgcaggtctgagcaaatgccttgggaagacaaatataattgctccaatttctaactataatctttccacattgaattctgcttctaacgttgtattagaagggaattgggtatatcataattagaatatttaaatggactttaatcccatccctattaccgacttctttactaagtctctagctaaccccttcgtcaagtgatcagctaagttttgttgcgaccgaacaaactcaatgtaatgagattgtgtaataacaatccccttattttcccgtttaatcttaataccaaggataacgtctgcttctcccatatccttcatggagaactttgatgacaaaaaattcttcgtattattaacttgattttggtcggtgccaaagatcaacatgtcatcaacatataaacaaatgataactcctttaccggatttatcaaacttgctatatacacatttgtcagcttggtttagaatgaaaccactagacaaaacaatctcatcaaacttttgatgccactgcttcggagcttgtttcagcccatacaacgacttaactagcttacacaccttatgctcattgccaggcattacaagtccttcaggttgcttcatatacacttcttcttccaaatcaccattcaggaatgctgttttgacatccatttgatgaatcactaaattgagaattgccgccaaggcaatcaacaatctaattgtagtgatacgagcaactggagcataggtatcaaagtagtcaatcccttctttttgtctaaagccttgaataaccaatctagctttaaacttgtcaattgtaccatcgactttcatcttccttttgaagatccatctgcaacccaaaggtttacaacctggtggtaaatcagataatatccaagtattgttttccatgatagaaccaatctcttcgtcaattgcttctttccaaaaaacagaatctcgagatttcagagcttcatcatacgttcttggatcctcctctatattataacaataatagtattgtgcatcaatctgatcctttgatccttcaactaaatataattgaaaatcagaaccataagatttagattttctagctcttttgcttctacgaggttcgattgtctcacttggtacatcatttaagtgatcatcctttagagattcatccaaaatcggtatagagttctttggtctaggcgtagaagagaagcaagtctcatcaaatatcgcatctcttgattctataattgtattaatagaaatcgagtcattaggttctataacataaaacctataagccttggaatgctcagcatatgcaacaaagatgcaagcaacacccttttcacccaaagttttccttttagggtctgggagtctaaccacggccctgcaaccccaaacacgtagaaatgttaagttaggtcgtttcttataccaaagttcatatggggtagtcttattccttttattaggaaccctatttaacaaatagcaagccgttaacatggcttctccccaaaacccttcactcaaaccagagtaagataacatggcattcaccatttctttaagagctctattcttcctttcagccacaccattttgttgaggtgtataaggtgccgtagtctcatgaatgatccctacggattggaagaatgcaggatcataatattcaccacctctatctgttcgcaatgttttaatcttcacatcttgttgcagttcaacttcagttttataaattttaaatttatctaaagcttcgtccttagcatgcaacaagtaaacatagcagaatctagatgcatcatctatgaaagtgataaaatactttttatgccctaatgatggagtagcatgcaaatcacataagtcactatgtattaattcaagtataacggatttccttgttatatttttaaaaggttgcctagtgatcttggttaacatgcaagttttacacttttctatattctcatcaaaaacaggaattaaatcatctttagacatttcacgcattcttttataatgtacatgtcctagacgagcatgccataaagacgaattgataacattcgaaatagacataaatacagaaccagaatcattaggaactccattcaaattcatcataaacataccattattataatatccaaatcctacaaacacaccagactttgataatacaaatttatcggattcaaatacttgcttgtatccaagcttatttaatacaggaccagaaattaagttcttacgtaatttaggaacatatacaacattaaacaaagtaatagtttttccagaactgaattctaacaccacgcttcctttgccttcaataggatcaaaatgatgatcttccatgtagaggacagaaccatcttccactggaacaaaagtcttgaaccagaaacgatccttgcaaacatgtgttgtggcgccagaatcaatccaccacgcgatagcatcatccttcacataaaatgcttcagaaattagtgaaaccgaatgtttaataaaacaattcaaatcacaagttgatttctgaccttcgttttgggattggtccttagacccttttcccgaaccacttgcattcgcgttattgagttttttcccataacggcaatccttcttgaagtgacctgttttaccacacttccaacattctagttttggtttcagtttggaaccgaaatttcctttggtgttcttgaaagcacgcttctttcctttgtttctattgttattgttcttaccgccctcttcgatcatattaaccgagggtccagcaacttcttttccttttcccttgtcaccctccagcgcccttagagattcttctatgcgcaagtgacttccaagttgaaccagagacaagtcatcttttccatgcttcaaattgtgtttgaaatccttccatgaaggaggcaacttgtctatgatacttgagacagatattgtttcatccatcttcaatccatgttgtgtgaattgtccaaggattcggaggagttcattgaattgttccatgacagaccttgattcaaccatcttgtaattgttgaaatcagtcaccagaaactttttactggacgagtcctctgccatgtacttggattcgagacaatcccacaattcctttgcagattctacattttgataaatatcaaataagggatcagacataccgttaagaatgtgtcctctgcatatgtagtcgtcgttctcccactttgatctgcgccttatattttcaacggtatcttcctcaagaatttctggaatcggagtagataagacgtacaccaccttcaatgttgtcaacatgaaatgcatcttcttctgccaacgcctgaagtcttgtccttgaaacttgtccaactttccgaaattagtagtcatgtccttgactatgcttcctccaacgcttcctccatccatgattatcagaaaatactttgttcgtttgttagaaaattagtatgataatcctggataaattcaaagaatcgtgttcgtacactttccgaacaaagtatttcgaccctattcttgcctgggttcacgaaatccttgttgggataattctttgaagaacaatctgcttctggcaatagagaacagatcaggaatgtagagagaaagtatgattttcgtatatattaaatctgaggccaaatgactccttatataggagttttccaaacaatgcaactcttggcgataaaccatcgtaaccgttggttatcggagcggttgggagtagttatatttctaacctttcccaagagcggttacaagtagttactattttgaattgttaaccgcctcttattcataactcatagagtttaaacaaaactccaacaatcccctggatcccagccaggggcgctgcctcttggaaccccgcaccgtaattgcggtcaattatgcgttggctcaacaagcgtgcactccgcactaccctaacttgtttccaaagcttaacgcgtaatcgcattggcctatagtaaatcacattactactaaaatccattgatgacactaaaatcaccaacatcatgcataatgaaaatagcagaagagagaagaagagaggcgccggagaagaagagagaagggaggagaaaaaatagaaaagaaaaaaaaaagaaagatttttttcattttttattattatttttttccttccgatcatcaaccttcatttttcggtaaaaaacactggttcatgagtgagtccgtaaaaaagcagtggttcatattagaatccacccaaacactcaatggtacttcatgtcgattacaaatttaataactatttaagttactaagtatgggtatatcgtaaaaaaaatagcatagatcattaaaaaatcacatttgatgcagaaggaaccctgacaaacaaaataaaacccactcagtaattaaagagggtttttcattattcaacaagtgaaaaatttacatacctctggaatgctaactttgagaacacgtctttctgacttttcgcccaattgacgcctggacatactataaagaggaaaccacgattctggagacgaaagcaggattttggagtgaagaacaaacattgaataaacaggagaggaaggacatgcgatgtcaaggaaaggtgggagtgcgaaaatgataaacaagcgggagagaagcgaaaattaaaaaggagaatttagtcttttgaatatttgttttgctggacaacaagttgtacttcgatttactgagttacaaaaattgggtctttttgtcatgtcccgtgaattttgttttgtcttgtgcagcaaccagttttacggatcaaacggagaacaaattgatttgttctgtcctgtctctcaaaattaagcaaatcaaacgaagccattgtatatttactcaatatcatatcaactataatttgtacaatattttttataaaagatactatcttaacaatgaggattaagctaaaaagatatggttccttgatctcctccttttgttactactaatgtgagctcctactccagtctccgtgatcccaagctcttctatttggcggatgggtaattgcttgtaagaaggtatgaacacctttcatttgtgatttagcctaaaattgctaaagtggtaacccattcttagtgatttctattagaattgctaataaaggggttacattttttaataaaggggagctatatagtcaatacaaatcgattaaaaacataaagttaatcaatgcatttagacctcctctggttcgacttgtagctcctatgacgtgagttccttttccaagtggattatccgcaagaaagatctaatcaaatttcatgaatctcattcctatgtcaaatttcgacattctcaggatccttctaagtgattcatggatacttccttatattttgaatgattaagctataatggttaagctgcaatttagtggtaattttttaagaacaatttacttttttaactcttttctttggaattttgattgtgacaatattatctattacttatgggcagtattatggatcttattgacattatttggtattttttgttctggatactctcacattagaagttttattagtatttagtaatgtaatgaagaaaatttgcaatttaaggatgaatgcacgtatattacataattgtcatgaaccattttgtcatttaggtatatttattgtagacaattttgttgtcgcataaggacatgttagaatgaaatcaagaacaaacttcttctcaaaatagttaactacacaaatttaaaaatcaataataaaaaaattcacaaagattttagttagaaatactatgtgctaacattaaacaccctctacacacatgaatttgtcacgacagcaacaaaaaatgttataacatttgcatttttgtggacttaaattgatcatttccaaggtatatgggtcaaacataaaatattggaaccaaagtggctatttacaaaaaaaaaatctcacattatcaaataaatcaaaacttataatcttagtctaattggatcaaaccttttacaactcctatttaattttcgacatttatttcatgtactcccgttgttttatcttgtaactcccattacatttcagaaaacccattccaaaatatgaattttatattctagaatgaactttcaaaatatataatgggaggtacatgatattatactggaagtgaatatacaataaccttaatttccaaagtttgggcccaaaacttaaatcaggactgattgggtcagtgggtcaattttcttaagcaaccaaaataatgagttggaccccccacaaaaaacaaacaaaaaaggtataaattaatgttcattgttcaacctcaaaatagaaaacagggaagattgaaataagaaaaggaagaaaaaaaaagacagggaagcttcaaacaacgcaccaccgattcttcatcccatcattgaaaattgcaaatgtaattactaattcaatggtaggggatttagctgtggttgagattatgtggtgttaaccgtcaaattgccataacgtacaaaagagagaaaaaagtctcttcaatgtttagcaaccttcgtagataagcatgcatcaacattttgcagcagcagacacacaagctgataataacataatgttgaattgaaagagaaattaagaaggaggaaaatgttttttctatttagtgtaaggccatagtaaggcaaaaaattgatttcaaatgataaagtttaaggtttatctaatgtaaaataaggccatatgcatgcatgagtaaaataattacggagcttctaattaatccgctataagtcaaatagcatagccggaaagtgggaaaaaaatattgttctttaataccacaagataaacttgagtattaatttctctagtatcagagcaaagagttcatttctaccactctgaacgccaccatatattgtgcactactcttccttcatttcattcttgattaatatgggtttggaatgtcattatctccaaaattattttaaattatcacttgctcaatcaatggttactttagtttagtgccaaggtatatgctaacatagtggtcaatgagaagctaataggccaagtgatgtgcaaaagaaattgcaaatgcttcgtgctagactttttaaaatagagaaaacggatgacactaagtttataaaaaaaatttacaccttcatccaattacaattcattatatacgataaaattattaacttttatataattattttaaaattcatatcaataataatttataattaaataataatataaaattattttacacttttaatgtatcattaaactctttaaaataaattggtactttcagaggatataggaattgattactattggtatattaaaaattaaaaattttatggtcaataatttttgacatccatggattaagatattattattagttgaacaattgatccaccacttgcacgcatatagtgtccaaaattatctcttcttttttgctaatagtccaaatcagaattaagaaagaatgttgtgttgggtttaaataatcgttcagggaatgaagacatgagttgtgagagttgatctaccaattttaataaagtagtgaagaaagatggtagaactaaagatatagccgaccctccaacttctataaataattagtttaagtataaattttatcacttaaatttcattattttataaagtttatcatgtaagttttattttcgtggattttatcatccaaattttaaatttttgtatattttaccattagtgattaacctttttttttatcaaattaggtagtttcaaaaactatttattagaaatagatgactttaacttttaacatggattgtaattatatatgacgtagaaaaatgactttttacatcaattataatcataaccaattttttaaaaaaaaatctacataaattataactacaacctatgttcaacaatttaaatataactttttacattgttatgttaccaacataataataaaatgaacaaaaataaaaattttagaagataaaatttgtgaaatgttaaaagttaaatgataaaatttgtaaaaagaaaaaagaataagtgataaaatctataaaattatgaagttgaatgataaaatttaaaaaataataaatattaacaatccaagaaatcttgcttagaaatctttgtccaatttaccaatcagatcactttcaatttttaaggaaatcatccaaaaataaacactagatagtacctgtatgcacggataaatttaaacaaattatttggattgtataaaatattatattgacaaaattattaattttttatattattgaaaaaataatttataattaattcaaattatttaaatatagaacttatatattaataaaaataataaaatgtaattatatataattaattttaatacaatttcaaatttaattttgacaacattactctcctaaaatgaaataaaacattttccattaagagtgtatcataaaaatatatttaattataggttataattacaataatataattatgtttatatttaactgttaaaagatataattacaaataatgtggaattaaaatttactatacataaatatgatagcagattagtataattaataaaaatgacttatatatataatcataaagtacgacgtatcacaaaataatataaataattcaatcaaaatataaatatattttaaaataaatatatcataaggcgaaatatatttaatcttcaaatttttaaataatttaatttaatcattaaatttataaaatcgatacaattaagttcttgggtgtaaattaagactagcacgttaacataggaaggtcatgtgtggcttttatactttctgagggtttaaaaacctcccgtaagtggtgttctattttataccgcaactccggtgagagcatgttcgcgcacggaaaacgcttttgaacgatatcttcgttaagacgcgcgacggcgagccatcgaaggcaccattgccatcgccctgcttaacgctcttgacctcttcccttctcatcagaagacacaatccaactaatgcaacccatgcgctttctcacactcgattaagaccattggaactccaccctcacaataaaatatttatttcaaaccccaatcatccgtttagcttcaccttaattttcccattggtttattatcatcattggactcattgggtaaacttttttaaaatcatttttaaaataaaaaaataaaaaaaaaataagaaaaatttttcattaaaagaataagttattctttaactaatttttaaaaatttataaatataatttttttaaaaaatgtgaggacatctataaataaattaataaaaaattcgtttaatttgtgaaaaatttattttattttttcttgttatttttatttatttagaaatttaaaaaaaaaacttacattcaaatactatttatcaaattcaaaatacaccccatcaactttccactcatgcttgcttttactcactctgaattcatcaacgccagaaagagagaaagcgagaaatagagtagagagaaggtgtgggtttagtacaaaaataaaaaataaaaaagaacatccgttaccggcggtttttaaacccccataaatgtaaaagtgacatgtgtttttaccttaacaacgttaatttcaattggcggaatatattttaaatcattaaatcttaaattgatcttaattaaatcaatcaaatataattatttggaattgattaattaatttcgaattttgaaaaaaaaatgtataagacatcttttcatcaaaacttgacacctgtgttaattttaacagatcatttttcaattattttaagatataattttatcaaatacttataatttattagttaatttttcagctttcaattatgttatttttaaatttcaactaatttttcaactgatttttccaaacatagtctatatccttatatgtaagatcatttaaactaattcataaccttaaaaaaagtgagtaataatattcattttgtaatcatatatagtgttctttcaatggttctggtacagcggtaaagttgtgtcttggtgacttgttggtcatgggttcgatcaggaaacagcccccctgacatagcagtaaagttgtgtcttggtgacttgttgatcgttcaattacttcacaagcaaagaataactaatatttggggagagaagattgtaattaattaaaagtattatgggataaaaataattaatgcactagattttaaaaatgtcttataaaaagtgacaaacaataaagaaaaaaggatgttatagtaacaaagctagtatatattatgaaaaattgatcattgttacgaaagattaattgtagggacctaattagtctctaaattcatctcttcatgtctacattgagtattctcacttctttaagtcatattttcacctctgtaggttttgaaccaagtattctcaatcaagtttttcacctagtattctcacctcttcaagtttactcaacccaaatattacttcacaagttactccaagattcaccctacaacaaccttgctacaaacatatacataactgacttagacaattaattttctataatggtagctagatggaagaacctaactaaaaaaaaattataaaagttcaaggagccaattcaaagaaaaaaaattcaagggcctaattagaaattatcaagtagttttgggacttatcaattaatttaacctagttaatcatattctttatcatcaacctaacaaattttggtggttaaaaatgtgaggaaagaggatggtgtcccaccttaagataggaaaagtcttcaaactcaaagaatacttacaaaaaaacttaatacactttatttcaaaatgtcaagtaaaggttaaaacatttgacttgttaaatataaaatcatgtcttacttcactcgaccaacttttgatacttaaattaggcatataagtaactcttaaaaggaaatttaggcttaattatacaatttggtatcttaactataattaaaagttcaattgaatttctcaattttaaaaaattcaattatgttttctaattattaaaaacactaaaatcatattattttcgtgacaaaaatatattttttatatcaattactaatataataaatgtaaacaaaattttttaatactgattatcaatgcaaccgacgtaaaatagtgtctttatcatgatgtaaaaagataatttcacatcggttggattgtattggtaatataaccaatgtaaaaattgcttatttactaaaatagtaattaagtaaaaaaattaatagaagaaataacaaatcataagcacagaaaatgaaaggcatttgtgactgctaaaaactacttcaagtttaaacgaccataattctcctgtcaacaacctctattcttgctttaatatgcatgatgcatgtgtacgtcatggttgtaacctccatagtagggaacagaggatgctaaacatggtggtagatttttggaggagaagggagggagtgaaatatttgaatattacgtgaatcgatctccaatcaccacctaccatcctttgaaattcatgcatgttcttccattactttaaatgccaaggaagggagagcgttgaatatatatgatcccaaatctataaacgagaaggataaggaagggatttgaaaaggtgacagtggtaatgaaaaagaaaagggaatttttttttcttttccaagcaatttcctcaattcctcttccttctttccatctccacggctccgtctcttcaactcttcctctatctctgcctcttcctcttcatcttttctgttgactgttgagtaaatatggcaaacggtaacattattcaattttattatacaacgacaacaacaaatttcgagtatatattcgattggtttcatgtacaaattcgaatacaaattggagtacgaattcaattttcgagtacagttttcggttgctaattggtttggagttgggattttcaattaattgaggtaagtgtttaatgtttttagtttttagtttctaaaatttgtaattcgtaattctttgtttcttgtattttcgattaattttcgattgaagttttttttttcttttttttgtgaatttcttatatagggatctttgatttctaaaaattgggagcagtgatatctttcgattttgtctttgttatcgacatttaagatagtaatctaatcttttttttcattactttttatttgttactgttaagttttactgttttagtttttgactttgatttttgaattggactcatgagtactaagtagattattattaggaatgtatgtgaagatcatttgttgaatgtgggtgtttgatactttgattttgaaaaggtttaggccaatttcttgttgttttgagagaaataagtatgtaacatttgtttagttgatattatttagtgtaacttttacatgaaaatcaagaaacttttactaaaacttcctattgggtttaattggtcaattttattggcaggaaccttggctgatcattgcaaattcaaaacgcaaaggattaagctgattatctttgttcaattctccaggtgctattgttcctataatcctatctatattagttatattacctattagttatattgcctaataatgttgcctaaatatttgactagaagtgagaaaataaagaaaagaaaagaaagagaggagttagtagaatcacaaaggggatctcttgatagattttttaagaaaagaataggagagacttctaaaggagtggaagtagacaatgtgggccaatctaatgaaaatttgaatgataatactattaatttggatgatcccaattatgactataatcgtgcgaatgtggttgtttctgatacaaatgaccatgataattccccaaatcatatcaatgaggaatttgctactgtgaatgatcctaatgatgtacaaaatgagtcaaatgttgaagatgttggggatgatctgcattttgttcctcctttagacatttacaatcctagaaattggggtatccttgataacaagtctagagacatcttagttgaaaaggggcctttaagggaattgaatcctaaatttcccttagatggtaattctaggcatttttcgtatgcttatttttctagaaagttgattaaaggagagaagagcaatagaaaatggttagtttactctaaacatgtagataaagtttttttgtttttgtttttgttgtaagttgttcacaaagctaaataaaaaaagctctttagccactgatggagtgaatgattggaaacacttgagtgaaaaactcaaagaacatgagaatagttttgaccatatgactaacataaatgtttggactgaattaagagtgaaattaaagactaatcaaactcttgataaagacttgcaacaaggaatctcaaaagagaaagaacgattgagacatgttttcttgagaataattactgcagttaaatgtcttggtaagaataatttagcttttcgataatcaaatgagaaactttatgaggagaataatggtaatttttttagcttaattgaaatgattgttgaatctgatttgccaatgcaagaccatattagacatatttaaaatgaagaaatgcattatcattatcttggtcataaaattcaaaatgagctaatttctatattagctcatagtgttagaagttctattttgagaattcaaaagacaaaatatttttctgttattcttgattgtacctctgatgtgagtcatcaagaacaaatgagtttaatagtacgttgtgttaatatgtcgagtgacaaaataaaagtagaaaagtactttttagaattcttgaaagtggatgatacatttgaaatgagactttataatgaattattaaatgcattaaaatttcttgagcttaatgttgatgatgtgagaggccaaggatatgataatggttccaatatgaaaggaaaacaccaaggtgttcaaaggagactacttgaattaaatccaagagctttgtatatgtcatgtgcttgtcatagtcttaatctcactctttctgatatggcacattcttgtacaaaagctatttcatttttcgggattgtgcaatgtatatatacattgttcgcaagttctaccaaaaggtggaaaattttgtgtgaaaatgtttccgaaactgtgaaatctctatcggatactcgatgggaaagtcgaattaaaagtgtcaaagctattagattccatgcttctaaaataagattagctttgtcaaaattatatgaatcttcaggtaatgatgctaaagcaaaaagtgaagcagaaagtttggctaatgcacttcaaaattttgaattcttacttggaatggttatttggtatgatatcttgttttcaattaacaagttgagtaaaaaagacaatgtgcattggtactactatgaaagaagtggaaggtatcatattatatttcgaaaattatagaaatgaagggtttgaagctagtataagtattgccaaagatttcgcgttaagtatggatatagagccaaattttccaactaaatgtcctattttagaaaaaaaaacaatttggtgaggattgtcatgatgaagatttgcaatcacctgaggagtcttttagagttaactactttttggtgattatggatatggcgattgcttttttgaaagacagatttgatcaactaaatatttttgaaaatgtttttgtatttttaattgactctacaaggttgaagtccttggaaagcaatagattaagggatcgttgcaatattttaaagatacattttctcataatactttgtcagatgttgatgcagatgacttttattctgaaatgaaggtgttgtaaatgactttaccaaatgagtcaatgacagcaattgatattcttgaatttgtcaaaaatgcagattgttatcccaacgtttctattgcatatcgaatcctattaacgatacttgtgacagtagcttccgcggaaagaagtttttcaaagttgaaattattgaaaaattacttgagatcgacaatgtcgcaagagagattgaatggtctagcaatgttatctattgagagaaatatgttggataaaatcgatgtagatatgatcataaatgattttgcgttaagaaatgtccgaaggaaatgctttttatgaagcattatatgtatctttaatatacagttttgaaaattatttgggatgtaatgaatttttatatcttttatattatttgtatttcaaaaaatttgtgtgttagagacccatttttttcacttcgccccaagtcaaagaattttcaataacaaccctggtagagagtaaagaaggaaaaagagagaggaggacatgggtgatagaagggggagaaacctaagcacattctagaagcattaaataaaaatggagactgtgaagttttttaaatcattgatcaagtatagattttttttatcaatgattcaggtttgaaatacaatatattattaaaagcaattgatgagtgtgtagctcaaaaaatgtgtttatttttttaaaactgaaataaaaaaatcaattaatttttatgtcaaaataaaaatttaaaaatgtgaaataatttgtaggatttgtatagaaaaaattgtaaaaactatactattatagagaaaaattattcaacttgtataaaaaaaactagcatcgaaaccggttcaccatacggattttgagaaataacaataaaaaatatttataaaaaaacttaaaaacctgtcctccaacaccttgtggtagtcggacagtttttataattatgttataatgccactaaaaaaattaagcaactaaaatgtatcataaaaattactaaaagtaggacttaaaaatatcctagataaaaaaaattatagataaggaaaaaatttagccattaactaatttgttctattatcaaatcatattgtttttaatatatgtgaattgaatacagtaccaaaaaattataatatataatatttacacattatatttaatcaattgagttagatcttcatataattatcaaataatatatactaataaattattattatggacataacttatctataatttcttaagagggtatttggatggagtattttaaaattttaaaaaattgaaatgtatcaattaaaattattgaatttttaaaatttcttgtttggataaatcaatttaaattttttattttttatttgaatagaacaatttaaatttcttatattttaaattatttctttgaattaaataattcaattttttatttttatattttttctcacattaaatttgaaaatttaaaatttgtcttctcccctctctaagcatcttctccactctccttaaattaactcccctcctctaacccttctcacacactcgctcttatttctctctctctctctaataaaaaacatgaatttggatacgcaacccaaaacgacatcattggtgcaacagctgcacctgttttgtgcacgtctcctgtccaccgtcgcgcctcccccttccttgccgtcacgcacaacccatccctcagccgcagctcatcgaacggtaacctcttttcgccaaatgctagattgattggtttttcttctaacttaccccgtcggctaagtgtcttgttagcacccatgtttaacaaccgctccaccatactctcgtctcccaccccgccgctgtcaataaacacttgtttcttcttttcagtgaaacaatcagagggtacaaattcaaaaatggagaaaggtcctttcacggtggtgctggaacaaagaagctgtggaggaattttagaattcctacctttttagagaagatttagaattctagacttttagttgaaacaaatttcattttagacaaaattttaaattttttctaaatgaatatcctaacaaattatttaggatgggaaattgtaaatcccctaaataattattttccccatttctattctctcatccaaactgtaaatgattttgttacttactattatcttttaaaaaaaatggagttttatttatgatcagactctctctctcttaagaagcttatggaatcgaagcaatctcaaggaagaagatgatcacagcagcagcaatactcacgtcgcaattggtgtgcggtgtgtgctgtgtgaatggaaatagagtcggaattgtctgtgtgtatctttcaccatggggaaccctgcatttatagggagctaacctggatcttgaagatgatcttgctcaggcccatcaccttatctttggatatttggaggtatagctgcaatctttccctttttacaccatcacaacatatccgttgatactctcaatatttagtctgatactgtgaatatttgaatcattatggcagagatttgatattcttatatccgtaacagatgcccctcagcctggtcatctagaattctgggtggccgggatgtgttttggtccgaccaaccccaatgccgaccttcctttggtcgagccgacctaaggtgaaggaggccgccctcgggtggaaacgacctcgaacgatcgtggccgtatgctgcaaactcgctccgaggtgagaagtcccccttgctattttcttccctcttttatgccgagctaggtcttgtcttttcaagcagtggcttggttctgattttcagcaagtgaagcgacttcttattcttactctgccacgtgtcgcgacgtgattgtttcttatttcactctttaatcattttactgttctgtattaatgaggtaaccgcttctctcacgtcctttattatccatcggttactcccccacgtttctttttgaatttctgacggttacttttttcctactcaatgtccctattagtattccacttcttcttatccctatagcgtttcatttctctctagaattttcctgccttccttgtgctttctcgaccgctgttcacttcaccatcatctgtgcttcctgttgtcacctttacttcaggtatttccttcttgcctttcccttttgccccttatgattccttactttcatattttacggggttttgtcgttattgaccttccatagcctttgtttattcttcgtagtccatctgcgatctccatctgctttatcgtagtttcttagttacacctttcactatttcaccatgaaatatacacccgaagaggaggctaggatccgtagaacagttcctcctcgttctgcattctggttatttggactccttctgtctgaggaagagaagaaaaaggctttgcttagggttccttctgctcctggcagttcaagagccccaatccctagacctcttatgccccctcaattagggtcctttaggatggggtcgtcgtcccgccagaggtctgctttgctttcttttcgggatgaaatgccttctctatcttctgcttcttccaatactgcccctaggggtgaccctgcccctgaatcacaattcgaatttcgatatgagccttgctcgagatgtgtggaggaattcatatatctagccaacattgatatggataaacaggccgatgatctattggatcggtgtcgacataatcctatcaccgtacccaaacccttggacgtagcaacacctaagttaagtgttactgtaccgacctccgtaccggcccaggctacgccaagtcctcaccctctggtgatccgtcctccaggtatttgactaattgttgtttctttattatcgtaggtaatcatggacctgtctcatgcgggaaacatagaggaatctactgtcgggccccaagccgttcccctagccttgtcaaataggttcccatgggttactcacgaggtcctgagttatacctcggtattagaccttgagagcctcgccctcgtccctgttgaagtccaaaatgggttttctgtttgtctttcccacttgggcgaacccatttgttccgccagggaggggaacgatcctgagtttttcttattctatactgatgttttcaccgagataggggttcgtttccccttttccgagtttcagatgcaggtattagaccatttgcatcttgccccttctcaacttcaccctaatggttgggcttttatccaagcctttgaaattttgtgtcaaaagctcgaagtcccctgtacctaccccttgttcttttatttttttactgtctatactggtcggtctggtaaggagccccctgagcggaaagggtgggcctctttccggggtcgttccgacaaggattctgaccgccagctgtttagcttattctctaaatccttcaaaggattcaaaaacaaattttttaaggtggttgctgtaccccatcgacaccccttctttctgaactcatctagttcttccaaaccctggaggtttcctttatattggacctccgttcattatgactttcctcccatttcctaccgaaccgataaggcccagttgtcagattccgaggttatttccgccgctcggatttatcatacagggattcggggaatcttgctcccatagcttattacatccagtgtggttagtttggatttcttttgattgcttgagaatttcagttattatctgctaactatttgctcttcctatgcagcaattgagatggacgccgctcccattccccctcaccttgctgccctcaaagggcgaaagaggcgtcgagtgacaaaaaagagtaaggctagtgaatccaaccgagctccagcttcgactgctccgactgtggaagcttcagagggttcaattccgagctcccctcatgcttctccaccgcgttctcctcagccgatctcacctcctgcctcttcgccgggtcctcccagtgctccccgactgagttacccgctcgaggtcatagatgttgatatggtggaaaccgccactgcaactgaagaggctggggccgaggctactaatgttgcgactgtggccgaggaggatgctgctgaagttagggaggtcggagtcgaagttgcgaaggttgctcttgggatcccggcggctatccccgaagatgtggtttctgaaagagtttcaagctccgggcccgagtcacccaaggagcttgttcagttacctccacgctctctctgggacaagggtgttacccccgaagtttttgaagtcattcgggcacccaaaagatattctgatgtggccctctatccggaccctgacctggaggagctgagttctatgcagctggcctgcctaaagactgccagtttgcttgggagtttggcttctcttaataggaaggcctctaggggggcgatcgagcttgaggctgcgaaagccgaggtccagaggttgcatgaagaactggatcgggctcaggtgagtgtggcaacctcggtggctgaggtggaagcttcccaggctaaggctgaagaggcgcaggcattgtcggccaaactcactgcagatttagaggcttctcagtcaaaggccgaggaggctggagatttggtgaaggctttatctgccgagctggaggcttcgagggctcagtcgtgggaggcgcggtcctcggtcatcaatttaacgactaaacttaacacttctcgggcctccgaagctaagttgattgccgatctgcgagtcgcccgagattcggaggctaagttaattgctaaagccgataccctccgaacccaacttgctgccctccgaagagaagcctcgtccgcccgttcttcgatagcagatttggagaggagtcttaacaaggctcgtgaccggtacaagaaagtgaagctttgttgtgacgagctttccgagctgaacaagaagaagggtaaggacgaggccgagctcttgagtgaacttatactagttcgtgcacagctgaagaagtctgcccaagcctccttcgagaatgccctgagtcaagtccgcttcctgaaccctggtgttagcttaaacaccgagggtatgcattttagagcctatgtcggaggcaatcaattgctcatggtttctgagagcgaagatgaaggatcggggagctctgatgacgctgctgacgacgtacaacctcaagccggcacggattgaagggccgggatgccggtttaattttgtaatagtgctttatcttttttgtacttaatgcacaagttacgttgttctaagtatcgagctttgtttataatcatattccttgcatttgttttcgggcgtcggttccaacgaccgcccttccttttatggtcatattagctaagcgtcgatggttgccgggaccattggtcgggctctttgcttgggaatcatttccctaactttagcaattgtactcgtaatattattgtagatgtagttcgttaggtcgagtcgatgactcatccataaatgattacgtcgatttgatcaagaccgaattgaaacaacgactaaaaaccgtgcacaataatattcccttataacaaggtttttattaatattctccggagattacataattcccacgatctcaatgaccggtcaatacgggtttaacgtgcccgatttatatgatcaactaaagagaaacacgtgataaaaaaccgaggtccctatctaaggaaaaccaggttgatctcccatgaccccgatgacgggcttgacagccaacaaagggggaacacatggtgagatgatggtccatgatccctatgacgagctagaagctaattaaagggaaacacatggcgtccatgattccgatgacgggctgtttgaggccagctaaaggaaaacacatggactatcctctttcaactgtaatatctctttagcttgtccgcattccatgtccgtttgatccgtctgccttccaatgtttccaacgagtacgctcctcgtcccaggctttcggcgacccaatagggcccttcccagtttgctgccaattttccttctcggacatttttgttgccgatatcggctcgccgcaagacgaggtcttccttctcaaatgatcttatcttcacctttttgttgaatctttgagccagcttctcctttcctcatagatctcggttgtgtgtagctgtacgaatctcgtctatcaaatctaggtcagccttcaacaaatcatcgttgtctcttggctcgggcatgtgctcccttctccaagatggttggccgacctccactggtatcatggcttcggaaccatatgttaacttgaatagggtctctccagtagacgtttggaccgtagttctgtatgcccacaatacgtagtaaagttgttcgacccattttggaccggctccatgcatacgcttttttagcccatccaagatgactttatttgccgcttcagcctggccgttggactgtggatgttcaacggaggtgaaatggtgcttgatcttgaggtcggtcatcatcgctctgaacttgttgtcggtgaactgtgtcccgttgtcggtgactatttctgctggaatcccaaaccttgcaataatggttcgttctaagaacctttgtacccgagccgaggtaatcgttgccagaggctcggcctcgatccacttggtaaaataatcgacagccactaccaaccacttcatctgtccctccgtggctttgaacggtcctaggaggtctatcccccacttgtaaaatggccaaggggctgtaatcgagctgagctccgacgggggagcccataatatcttagaatgtttctggcaactgtcacacttcttgacatgttctgccgcgtcggccttcatcgtcggccagaagtatcctgctcgtagggccttcagggccaaggccctcgctcccatgtgttgtccgttgattccctcgtgtatctcggcaagcacgtactccgcttgatccgagccgaggcatagtagcaggggggtgtggaggcctcgacggtataatgcatcatcaatgatcacatacatcgcagcgtcttgccccagctttcttgctgcttgctcatcgctggggactattcctcgttctagatagtctataagaggccttctccaatcgtcgtcggtcgggatgatcatgacgcacgtgggttgagcaatttcctgctgaatgatcgacctgtgattggacgttcctttggtgctagccagtttggatagtatgtcgactcggacgttttcctcccgaggtatgtgggcaactactacctcgtcgaattctgccataacttcctttaccttagtcaagtacttggctagcaaaggtcccttgacctgatactgtccttcgatctgagccgagacgagttgtgaatcggtgaagatgttgactttcaatgctccttgctcccttgcttgtttgagcccggcgatgagtgcttcatattctgcctgattattagaggtcgggaagttaagttacaacgactgttcaagggacacgccctctgggttctccactatgaccccagctccactcccttttgcattggacgacccatctacatataccttccatacttcttcttctttctgtgtggccgacgttggggttagctcaacgacgaagtcggccagtgtctgggacttaatggcgctccgagcctcgtactttatgtcaaattccgagagctggatggcccaattcatcattcttcctgctaaatccggtttgtgcagcacctgtcggatcggttgacttgttcggacaatgatcgtatggctctgaaaatatggtcggagtctcttggccgttgtgagcagggcaaaggctactttttcgagcttctggtaccgtagctttgagttcttgagagctcggcttacaaagtacacagggaattgggacctgccttcttctctgaccaaaacggcactgatggcttcatctcctactgacaaataaagtatgagcgtttccccaggctcgggttttgacaatactggcggcaaggccagacaggctttgatcttcttaaaggcatcttcgcatgcggagctccattcaatgctggcctcctttttcaataacttgaagaaaggaagagctgtctctgctgactttgggagaaatcgggtcaaagctactaaccttcccgttaattgttgaacctcttttttgttagcgaggaatcgcatatccaggatggctttgcatttgtccgggttcgcctctattcctcggtgggttaacataaagcccaagaatttccctgcctttacgccaaatgcacatttcaacgggttcaagcgtatgtcgtgttgtcgcaatttctgaaatgtttcttcgaggtcctggatatggtccctgttgcgcgatttatgcgaatgtatatacggcaagtgcaccgatcgttaacaagtaataaagtaggtaagtgagttatcgtctccacagggattggggtaattttcacaataatattaattctaaatgattggaattaaaaacagaaaaataaagaacaaagaaataattgttgagttgtggttggtgtttgaataaaaacagaaattaaagtaagcaaaaagataaagaagttaccaatggaagaaacaattgtggtcaggcacaatcccttttgtccctacctccttcacttgattggtttattatcttaagtcacacacatgataaatctttcctaaattcgtaaatcctagaactactagagtcataaccagcgatttaacccgttagtttgatcgagaaacctaaacccttagtgaatctgtcaaactaagtattcaaagaatatatctcatgtgatcttgttaagattattcggaaaataagtcttttctaagttagttaattcctaatgtcttagtgaatcaaccctttaacccaattcaaaaacccaatttcttggtgaattctattaagttaagcatgaaaaagaacatattataaaatccgtagccacgcatccctatgtctaggcgaagaacaactattattctaaacatgtcagaaattagaaccccaacgtgtccattgcgaatcctaaccctcaatacttaaatagaatggccaattccaaataagagtaaaacattgaatagcacagagtagaataaaataatcaaaacaacattagaatcaataccaattcaagttacagaggagttacatcagttcatggccttcccacaatacaagttcagcctgccataggcttcaagaaaccaaaagctatcaaatagaacattcttgagtgaccttgccttgattcttgacctccaatggtgagaatatgagaaagagagagtggaatgaatgatagaaggtgatggtttgaacccccccagaggcctttatttatagatagatctaattaaggtaacaaggcctattttctgttccaaatctaaatcaaatcttcttaattaaggaaactaaatatatttatagaatcacttaattaaggcaactaatcctaatataatatcaaatctgaaaatatataatttaaataaggaaacagcatcaacctcacgcgacccgcgcgcgattccacgcgagtcgcgtggactggccgaaaagatggcgcttgtcgcgtgaaatgtgaagttcctcgcgtggagtaacagaagagaattccttatttctttgagtcttcacgcgacccgcgtgacactccaagtatgtcgcgtggaatagcagcgttgaaatgcttaaatcttgaagttcccacgcgacccacttgagtaacggcgctacccgcgtgatcttctctggtcttccaagtggcccgcgtggatgttggcgcgactcgcgtgatactccagaatttgttttcttctttctctggcctttattctcctcttttgtcctgaaaatgcataattggtattggaatgagataaaatagaatattattaataaactaactaaaactaaactaattcctatttatttaatcaaaatataagctaaaactattctaaaaataagatgtgtttgcaacacatcagtcccccgatgccgacgtctttgcaatcatatcgtcaatgtagacctcgatatttcgcccgatttggtctgaaaataccttgttcatcattcgttgataagttgccccagcattcttcaaaccaaagggcatgacctcgtaacaataatttgccttaatacctcagaatgctgttttctcctgatcgtcccgatgcatgggtatctgattatacccggaatatgcgtccatgaaggatagaaactggaagccagccgagctgtctacgagttgatcaatgcttggcatggggtatgagtcttttgggcagaccttgttcagatcggtataatctacgcaaaccctccactttccgttgggcttctttaccataacgacgttggagagccacgttgtatattgtatttctcttatgaacccagcctccagaagttcgttgatgtgcttcactagggcctgcttcctgtccgggccgagcttcctagtcttctgttccactggtctggacccggggtacacagccaatttatggcagcagaaagtaggctttatcccgggtatttgggaagccctccaggcaaaaacgtcttgatttctcctcaaacattgtaccaatttatctcggctttcggagttggcctgttttcccacctttgtgatctgatcgggaaaagatccgatctgaacttcttccagctcgtccattggctctggcctccactcttcaacgtctctcatatccagttctaccaaattgaccggctttctgacacgttttggcgtatttgtcacctcctccttgcggatccgtggtggagaagatggactgacctcggtctcccgaattgtgttgtaataacactgcctggactccttctggtcaccgcagatcgtgataactttaccgaggtgtccgatcatcttcatcttttgatgttttgtagacatcaaaatatcccatttgtggagagtcggccttcctagtatgatgttgtacggtgaagggaagtcggccactgtgaatgtgaccctttcaaacctgaatccttcctttgtccccaacgtgagctgaagatcgatgacaccttttagtccggtgccttccccattaaacccatataacatagtctgacagggtctcaaatcctccatccttaggttcatctttttgaaggccgccatgtttatgatatcggtcgagctgccgttgtcaacaaatatccttctgactcggaagttggccactgtccttgtaatcacgaggccgtcctcatggtccggaacgacccccttcatgtcttccttcgtgaagtaaagtgggggcggctcggcccgcccgctgctattgccgctctccttgaaccgaggtcggtctcttaccgacattacctccttgaggtatttcttcctttgtcctgcggtgtcgcctccacctcctaggccgtcaaagataacgttgcactcgaattcgggctcggggaattcttcatctttcttgttcttttttccctctcgcggtttactctcttgttaagcttttctcttgccttgggtttgaattacatactgtcgtaacttgccttctcgcacaaacttctctattgcatctctgagctcccagcactggtcggttgtatggcccgggctgttgtggaaatcacagtatttggagtaatctaatccttctttcttcaatattgggggaggtcggttgacctttctcatctcgttgaaagcgacctccttccatatctgacagcggggggctgtcagcggggtattaggtttaatcactctctcactcaaacataatcaaagcactaccataggcttgaaaatattctcaacagatgcaagcataattagatcagaaggtcttttaggattgtaacttggctgggctaaaggtaggaaaatctttggatagtagctaatatgaggctagatccagtcctttaagtccaatcttgtagtcttccattttcctggttcatcttcttcacaatctggtactttattcaacatttataataactaaaacaaaacaaacaataaactttctttttgatttttcttttctttttactatacagcaactttcaaacttttcagcttataatttcaggcataatatttctcaactggcctgctgcttatttcttctttttctttcctaccaattgaattcactttgttttccttgatgccttgatgaacacttccctgttttctgttgtcatgaacttaaattaccttctctaacctcagggaggttgatcaatggacatggctctgattttggtagcagaattgaaaggctaaagctcaaaattaggtgcaaatggaataatgattgaaggtaagtcaatttggccctagttttaagaagaagaaagtgccttaatcatgtcaatttatacctgcatccagagaaacaattcaagttctagagtactaagaaaatggagtctctcaagaagaaaaaataattactgtttggctcaaaagtctcacaggtatttcactcaagtcaatcactattgacttcatttcaagcaacatttcaacttcaacatgcatgtcatataccaacaatcaaaatccaatcatgtatcatgcaattcatgctatatttcatctcacacaagcttttatcagagaattcctatccattactgtgttcattcacttttaagtcagaaaaatttgatgtgctgccaacttattgtaataaaaatttaaaactattgactaaaacaaaaaattttctgttagacatccttgaatgtaattcagcaaatactgtatgtgtaccattcccagatttaggaaattgctgtcctcagcaataattgaaagatattatgtgttgtctaaacaaacatgtagtatttgagaatcacatttagaatgaagcaaaattatttaaaacagataactactaaaacatatcaaaaattaaaaacagaaataaaaacaataaacaaatttaaataatcctgatgttggcattttctgcagtatgcaacaatactgcattttgcttgctaattccttcttcaattcgtatgccctgaaacttaaaacaaaaatcatatatacaggaagcagtggctgaattcccagatttagtcttttcattcagctcatcaacaatcaacccaggaaaatttatgcattagtggataacattcaaacaattaatagcacagttgttaaaaacagcaattatgtgtgtaattggttggaaatttaaactgctcagaatttcacagtgctcataattcccagatttatttcattccatagtttcacatagtcagctgtttgttattcacttggggttaaaaatttcagtactaacgatcagttctaaacaaccccaaacatatctcagacacctgtaatttaaaatttaaaacatgcaagccaagctataattatttagaaaacaatttagtgcttaacaaggcttaccaatgtggattcccagatttacactcaaacatattacaaataaaatcattacttagaaccacacaagaatcacatcgctttggatgtgcttaatgatgtgttgtaagcacatcttaattttagtatagttttaggttttattttatgataattcttaggaaattaggttagaattagttaaattcttgtttttcatatttacaaagcaaatcaatactaattactcatttcaggtacaaagcaagaatgagagcctcaattaaaagagaaaagcaaaaattaagttccgcgcggttcgcgcgggaactcgcgagaatggcgtcaggtgcagggcatggaacaattcacttgaagaatccacgccatcagcgtggattttcacgcgaatcgcgcagatggcttaaaacagtccaaatgctcgaacaatccacgctaactacgtggactatcacgcgatcagcgctatgcagtcgaagcaaccacgcaattcgcgtggatcaacgtcattagcgccagaggaagagaaaattgcagtaattctttcgaacatctcacgcgattagcgtgagtcttcacgtaatccgcgtgagaagaagctgggatcaagctgaagtctcgaagatctcacgtatttagcgtggaagcccgcgcgggtagcgccactcattcgaaaggcccacgcgatcagcgtgggatcgtacgcgatcagcgtgggaagtgtttctgataaaaaaaataggcacgtggtcagcacctgtacttggggatttaggcttttctataagtagagggattggaaagtacgaagggggctgacatatacacagggagtcacaaaaatagagagattaggtcagcttttagacttaggtcatttccttccattacccatccttagtatcaagtgattcagctaaggttctgcactccaatggaaggaactgcagctgttctgtgcttgaagactatggtgggctaaacttctgattgtgggaagggcatgaatctatgagaacttcttgtatcttgattggatggtattgattttatgtattgtttgttttactctcttctgcctttatcttactcttacttgaacttgatcaattcaattaagaacataggattagaattcgcaatgggaacgttggggttttaatttcggaactgaattagggtaacagttgttcatcacctaggaatagggatgcggaactgcagtgccacaataggaactttcaaatgcttaatctgatagaatccactaaggaattaggttttcaactcagattagagggctaatgcactaaggaattaggtgttagctaatttaggaaaggcttagtgctgaacaatcaatgcatgaccctcttatgatttgttctcttaaaagcttaatttgacagaatcgctaaataattagggttctcgatcgaattgaagagtgaaatcgctagttatctaggatttacaattgtaggagagacttatcattcgtactcattaatgacaatacgccaatcaagtgaagagaagtgatcttagtggagtgcacctgaccacaatttactctccattggtaatcttcataaacaattagctattactatttcttacttttgcatcttagttaattactcaaccaaaatcaacaacaattctgtttttgtatttcgcttgtgatttcaatcataatagtttaatttctgtgaaattaatatcaatccctgtggagacgatactttactttcactttattacttgataacgatcggtgcacttgccgtatattcatttgtataaatcgcacatcacttaacaacaattcccagatttaagtccttgcatgtatcaaaattttcagaattcaattatttcatgcaagcctacccccatttgattcaacacttaagcacatataaaagatgaatctccccattcccagatttaggctttttagcatttttaaggcgtttgattcaaaacattagcaattcatgccttaagagtatttcattattactcaattcctgcttaccatagtcattctcatcatgtcatcttaattcattaaagccttatgcatattgaaccaactttggcatcatttcaagctaaatttttcatctaggcatttcatcaaacaggtaatgtgcatggaaacaaatcaacataatgtgtgtatttggagtatgctaaaacccaaaattttatcaacataaaacagccaacacacaacccatttgatcatcagttattaatactcattcatatttggttctctaccctagggtttttccagcaattcaatcagaaatgagtaagaaggatgagaaggtgggacattgatataatgcagtggataatgatatcattaatgatttgcaacaatttaaggttcagattcttacctcatgcttagccctatgaaattcaagcttagggtcttgagatttggggtaaggtaagtctagggactgagtttggaagtaggaagaaatgaggtacaagctggagcctttaaaaataaaactaagtctgcgatctcacgcgggtcacgcggtggacggcgcggggcgcgccatattccagtggaaggatttttggctctgccttatcacgcgaccggcgcggattccgcacgacctgcgtgggttggcagtatctttggcgcgtgtcgcgcggtgggcggcgcgggtcgcgcagatgccctgcacagtttttcactaagtcctatattttgatttttggacctattgcttatttaacttattctaaagcatcaaaaatttgaaaataaattatttataaaaacatattgaaaatctaatattaactgaaatacttaagtaagtataatgattatatggatgcatgcatatgtaaaataaaacaaagactaggctaataactttaaaacttaagcaacagttatgtacatgactagagcttgtttaacgtcttagctagacgcatcatgctttttaatcattagtggatttaagtggattaggagttttagcattatccacttggttttcaatgtgatgtttcagccggcatttagcaactttaaaaggtttacctctgtctacgggcatgatttctatgaatccaaatgagcaattcttttgaatgatgaatggaccagaccaacaaaatgctttcttacctggaaatatcatgcgatatgttgctagcattacctttgtccctggctcaagttgcttctttctagtcttctttttcttggttgtagctttctcaattgcagttaaagaccttttaattgcagattgcaatgttccagctttggttgaacttatttccagcttacctttttgtgctccaattgaatgattaccttgctttttctccagcacatgttctgctggtttttctttatgaacactgctgcatttttcagcaatttctagtgctgccattgctatccttgttgcctttactgcagtattgttttctgcacaatctgaggctactggtatagctactgctgtcaaatttattgcagcaatttctgcatgtgctgaactctcttttgcagtatttttcactgcagttgctgcatctaatgttgttacacctgcacaactcatgtcatccaacacatttaacatagaacaattataacttttagatggattagtcttagagttgaaaacattaaaaatcacagattcatcatctaatctcaattctaatttaccttgttctacatcaatcaaagccctagcagttgccaaaaatgatcttcctaaaagtagagggatctcactttcaccctccatatctaaaaccacaaaatctgcagggaagatgaatttatccactttcactaacacatcttcaattattcctgatggtttccttaatgatctatctgctaattgcaaggaaactccggtggattttaattcagttatacctagggacttacacatggataatggcattaagtttatactagcccctaaatcacaaagtgcctttcctatatttatatttcctattgataccgggatattaaaacttccaggatctttcaatttctttggaagttttcttaaaatgatggcactacactcttcggtgagttttatggttcctccttttactagcttctctttcttagacagaatttctttcatgaattttgcataatgaggcatcttagccaatgcctcagcaaatggaatattaacatgcaactttttaaacatgtctaagaacctggcaaactgctgttgttggatttgttgtttggttagcaccgaatatgggggtttctcaaagcgagagaagtcccattgcttctttggttgatgtgcagaattttgttccccagaattttctgcagctttttcttcatttgtatcagttgctgcagatttttcaagttccttgttgcttgcctcatgctttatgggttcagttagtacttttcctctcctagtggtgacagcattgacatgttcccttgggtttgtctctgtggtacttgggaactgtccttgtggcctttctgcaacttgctttgccaattgaccaatttgaatttcaagattccggatggaggcatcttggtttctgtggtgggctctagtctcttggatgaattcagatgttgtttgtgccagttgcattactactttctcaagttcagaaatgctggtggtaggaataggagggggctgtagataattattagacttgtagtctaatcctcctccttgcagattcctttgataattgtttccagcagtataattatagtttttctgctgtggttgctgctgtctttgatcattccaaatgccattaacctgcacagggtcagctccaacaagaataggacaaacattagaataatgctcaccttggcagtattcacaactgacttgtggtttactggctgaaacttgggctgcagagacttgcattctatctatcttttcatttaatttagccaattgttgggctaaaattttctgttctgcaagcatggcatcactgctgtccaattgtattggttctctctttggctgaatggtgttgcttacgttttcagtgcaagccaaagatttaattagctcataagtttgagctgctgtctttgatctaattgtgcctcccgctgcaacattaacaatcattcgagtttcaggagttataccattaaagaatatccttacctgcttacctacaggcatattatattgtggacatctccttatcaactcttgaaatctattccatgcagcgtataaggactctcttccgttttgtgtgaagttggtgatttcattcaccaagcggttgtatttttccatggaaaaatattcagcgaagaaccttgtaaccagatcttcccatgttgagatgctatttggtgtttgacagtttaaccatctcaatgcatttcccttgacagcaaagggaaataaactcaatcttaccacatcgtcggagactccttgatgtctaatggtattacagattctaagaaatctgtctataaaatcatgtgggtcttccgaatcttctcctccaaattgactgcgttccaccaaaactattaatgaaggattaatgtcaaaatgattagcttgaattggtggcctcacaatactggagttaggccttgtgaaaataggagccaaaatatcctccataagttcatcctcaggtcttgtccttggtgggggccgatgatttctttcttcttcagccatctctatttctgattctaactctaattcggggatcgaatcaaagtcaaaattctcagcttctcttcttcttctttgtatggctagtcttcttcggatggttctttctatttcgggatcgaactgcaagtcctcagaattgactaaacctcgcataaaacttggagaagcaattagtaataaaaattccaatcactaaaattaaaaattactgtaaaaatccgttaaccaatccccggcaacggcgccaaaaacttgttgcgcgatttatgcaaatgtatatacggcaagtgcaccaatcgttaacaagtaataaagtaggtaagtgagttatcgtctccacagggattggggtaattttcacaataatattaattctaaatgattggaattaaaaacagaaaaataaagaacaaagaaataattgttgagttgtggttggtgtttgaataaaaacagaaattaaagtaagtaaaaagataaagaagttaccaatggaagaaacaattgtggtcaggcacaatcccttttgtccctacctccttcacttgattggtttattatcttaagtcacacacatgataaatctttcctaaattcgtaaatcctagaactactagagtcataaccagcgatttaacccgttagtttgatcgagaaacctaaacccttagtgaatctgtcaaactaagtattcaaagaatatatctcatgtgatcttgttaagattattcggaaaataagtcttttctaagttagttaattcctaatgtcttagtgaatcaaccctttaacccaattcaaaaacccaatttcttggtgaattctattaagttaagcatgaaaaagaacatattataaaatccgtagccacgcatccctatgtctaggcgaagaacaactattattctaaatatgtcagaaattagaaccccaacgtgtccattgcgaatcctaaccctcaatacttaaatagaatggccaattccaaataagagtaaaacattgaatagcacagagtagaataaaataatcaaaacagcattagaatcaataccaattcaagttacagaggagttacatcagttcatggccttcccacaatacaagttcagcctgccatagacttcaagaaaccaaaagctatcaaatagaacattcttgagtgaccttgccttgattcttgacctccaatggtgagaatatgagaaagagagagtggaatgaatgatagaaggtgatggtttgaacccccccagaggcctttatttatagatagatctaattaaggtaacaaggcctattttctgttccaaatctaaatcaaatcttcttaattaaggaaactaaatatatttatagaatcacttaattaaggcaactaatcctaatataatatcaaatctgaaaatatataatttaaataaggaaacaacatcaacctcacgcgacccgcgcgcgattccacgcgagtcgcgtggactggccgaaaagatggcgcttgtcgcgtgaaatgtgaagttcctcgcgtggagtaacagaagagaattccttatttctttgagtcttcacgcgacccgcgtgacactccaagtatgtcgcgtggaatagcagcgttgaaatgcttaaatcttgaagttcccacgcaacccacttgagtaacggcgctacccgcgtgatcttctctggtcttccaagtggcccgcgtggatgttggcgcgactcgcgtgatactccagaatttgttttcttctttctctggcctttattctcctcttttgtcctgaaaatgcataattggtattggaatgagataaaatagaatattattaataaactaactaaaactaaactaattcctatttatttaatcaaaatataagctaaaactattctaaaaataagatgtgtttgcaacacatcagtcccccgatgccgacgtctttgcaatcatatcgtcaatgtagacctcgatatttcgcccgatttggtctgaaaataccttgttcatcattcgttgataagttgccccagcattcttcaaaccaaagggcatgacctcgtaacaataatttgccttaatacctcagaatgctgttttctcctgatcgtcccgatgcatgggtatctgattatacccggaatatgcgtccatgaaggatagaaactggaagccagccgagctgtctacgagttgatcaatgcttggcatggggtatgagtcttttgggcagaccttgttcagatcggtataatctacgcaaaccctccactttccgttgggcttctttaccataacgacgttggagagccacgttgtatattgtatttctcttatgaacccagcctccagaagttcgttgatgtgcttcactagggcctgcttcctgtccgggccgagcttcctagtcttctgttccactggtctggacccggggtacacagccaatttatggcagcagaaagtaggctttatcccgggtatttgggaagccctccaggcaaaaacgtcttgatttctcctcaaacattgtaccaatttatctcggctttcggagttggcctgttttcccacctttgtgatctgatcgggaaaagatccgatctgaacttcttccagctcgtccattggctctggcctccactcttcaacgtctctcatatccagttctaccaaattgaccggctttctgacacgttttggcgtatttgtcacctcctccttgcggatccgtggtggagaagatggaccgacctcggtctcccgaattgtgttgtaataacactgcctggactccttctggtcaccgcagatcgtgataactttaccgaggtgtccgatcatcttcatcttttgatgttttgtagacatcaaaatatcccatttgtggagagtcggccttcctagtatgatgttgtacggtgaagggaagtcggccactgtgaatgtgaccctttcaaacctgaatccttcctttgtccccaacgtgagctgaagatcgatgacaccttttagtccggtgccttccccattaaacccatataacatagtctgacagggtctcaaatcctccgtccttaggttcatctttttgaaggccgccatgtttatgatatcggtcgagctgccgttgtcaacaaatatccttctgactcggaagttggccactgtccttgtaatcacgaggccgtcctcatggtccggaacgacccccttcatgtcttccttcgtgaagtaaagtgggggcggctcggcccgcccgctgctattgccgctctccttgaaccgaggtcggtctcttaccgacattacctccttgaggtatttcttcctttgtcctgcggtgtcgcctccacctcctaggccgtcaaagataacgttgcactcgaattcgggctcggggaattcttcatctttcttgtttttttttccctctcgcggtttactctcttgttaagcttttctcttgccttgggtttgaattacatactgtcgtaacttgccttctcgcacaaacttctctattgcatctctgagctcccagcactggtcggttgtatggcccgggctgttgtggaaatcacagtatttggagtaatctaatccttctttcttcaatattgggggaggtcggttgacctttctcatctcgttgaaagcgacctccttccatatctgacagcggggggctgtcagcggggtgtatttttcatactttggctcgtatcttcctgacctcgggcgagagtcaaggaggcctcgtgggggtcggccagcaggaacgttcgagggctgccgactgttctgcccaggatgcatgtattcttgacgtcggttttttggtgacggcggtttcggggctgagttggcaatttccatctgttccaactccagatacttcttggccctcactctgaactcgtttaaggatctcacggggtccttatagatcgacttggctagtcgagacgacccattgagtccggctgagatgaggtaaacatggaccttctcttctaacccttgaacctgcaatgccgcctccttaaatcggtccaaatgtcgtatttttcctaagacgaattccgattccggctgctttttgcttgttgcaaagtttagcaaaaacttctggccaaaatcttcgaagctgtggatagacctcggcggcagtgaatgaaaccatgtctggacggctccggttaaagtggtggcgaagattcgtgagatgatgggctcgtcgatgcccctcacacacatttgcatgtcaaattcatcaatgtggacttgtgggtcctggcttccatcgtatttggataggaatgacccgtcaaagtcctctacaaactgagcgtccactatttggtcggcaaacgggctgttgttctggtggccccgacgatattttcttcgatatatgccctcgccttggtcggctcggcgaatgacttcggttggtccgtgctttggtgctattgccgaggcagcatggaaagccccttggtgagagcgggacatcctctcctgttcggactggtgcgtcggttccctattgccagtctcgacagttcggatcgacgtaccaggcctttgtcttctgttctcgtggtctcgatggtcggtattttgccgacgttctccctcccttcgcctgttactacgttcttccaactgagcaataagtcgttgaatgtccccctggcgctgaagttcataacgcttttccaggttctccatccgggccagcaaggattggagagcgctttggataaaacgctaagaattcccaggatcctcctcctgccttaggttgtctggtgctggtctcgacgaggcggtgtgggagagtgcgtcctctggttcaacgttctctggaatcgcgttcctgggtggttcttcatgccttgccatctggtgtcttctggtgtcaaccatcgcgagttagtgggatttgaaatttatcgttcccacagacggcgccaatgttctattccgtgagaacagaggtgtccaacaatggtgttggaaagattgatgtatgatcagactctctctctctcttaagaagcttatggaatcgaagcaatctcaaggaagaagatgatcacagcagcagcaatactcacgtcgcaattggtgtgcggtgtgtgctgtatgaatggaaatagagtcggaattgtctgtgtgtacctttcaccatggggaaccctgcatttatagggagctaacctagatcttgaagatgatcttgctcaggcccatcaccttatctttggatatctggaggtgtagctgcaatctttccctttttacaccatcacaacatatccgttgatactctcaatatttagtctgatactgtgaatatttgaaatcattatggcagagattgatattcttatatccgtaacaggatgggaaattgtaaatcccctaaataattattttccccatttctattctctcatccaaactgtaaatgattttgttacttactattatctttaaaaaaaaaatggagttttatttagataaatttcgtattttaattttggttagaaagcaatgtaaagatgcttcctgttgttagtcaatataagctattatgtatggttagattttttggattttgtaataattattttaaattatataaaaatattcataattattataaacttttttatacttttttactgctattttttaagaaaatatacttataaatatatctgttaaactcaaaaaatatattgctaaaaatacttagatgattgcatttaaattgtatctattattttattattgttattattattactattactgtggaatggaaacaaaggtcttagcatacatgtatgtttacatttttatttcagtatcattttatcatatattgtacatttatgtatatgttaattttattatttgtactaattattttttatttcgtgaaatttgatatattataacatatttcttttattatgcgcgcgttgacgttttggtttaatatttttctatatattatatgtttatatttttttaactcagtaggcctttattacttatggtaattatccactgtacataagtttaaacatatataaaaatgatgaaaataaattaacctaaaaaagacgaaagtaagatcagattatcaattgtaggcaagaaaaaagcgtgtcctataaaatatacaacaattatacgtatgtgtataaattaaacagtgtccaaagctccaccatcaaataatttcttaataatatatttgtaaagaaagattatatagtatataatttacactgcccatttgatctatacctattctatacattgtacgtggttataaacaactattgataaatatatttttttatttgttttgaaaggcaataagtatttttctgttaaatagaaatatccataaacatgtataaattaagagatactctatatctataatattctatatggctatataataatgtctaagcctccatcattaaagataaattatagtaatttatatggcataaaaattctatacatgattatcttcttatctaaattacatgacacttataattttaaaaaataacacttgatattattttctatttatatacgcaacttgaatcatgaaaccgcataaagaaaagaaaaattcatcatgtgatagaagaaatgtaagagactcaactcaagtttaagaaaacaaaatcaaacaaaaacttaattggagaactaattttgtgtctttgttgtgtgcaattaattcacgcgtaagtttaagaaaaaaagtcaaaagaagattacactcaagtgtattactattaatatctcaaatcacacacatctatagaagtttaaaataaaaattataagatagtaagagagagagagagagagagagagagagaaaataacaatcatcttgtttaaaaaaactgaaaatttttcaataaaggacattgttgttggtgtttcaaaatacacacaggcgcgagtttttgttttaaaaaaaaagatagtaacaaaaattaagaagccttggtagatttttaaagttttaaaaaaggactttttaattaacaaattaatagattaattaatttaagtttacaaaaatagataattttcaaattaaatgaaaattggttactttctaaaaaatagatgcacaaaaaaagctttaaaaccaattagggattagtacgctttaaaattttaaattagttttttttttactctccattttttaattttttatttttgtaaagggagacaataacaattaaataaagttttttaaaaaactgaaaaacttcagtcattataagagtgttttcctggatgttggtaaactgtgatgggaagacaaagtttaaaatcagtgatacttcagaaatttaaaattaaaaaaatggcaatttattaaactatataccgactttagagaatatatagtttttcatggactataatttttaacaaataaataaattgattactgtatctacaaaaacagaatattaggcatcaacattgataggaaaagaacattaggcattcattcctctatgatactggcgttgaaagctattgttttgaaatgttgtttccactttgtcttgtatctcatcaatatgacaaattgatttttggcttgattgtagacttcccctaaaaactaaaatcttagatgactattattctgaatccaaacttaatttatcatccaccatcggtcgatacacttttcagtcaataaattatatgggggagcactaagtacacacacaaaagttaaagcctcaatacacatgacttctcaataaagacaacttcaacaatagaaataattttttttatgcttatagaaataaataaataaatgatgagaaaaaataaaatacatattcaagaatttcaacaataaaggtttttcttgaattttcagaaagtaaaaaagttaacaactttagaaacgctaaagaggaaatcttactcattgttgctcttgtaaaaacttatttatgcattatggtacgtatattttggtgctgaatcatgtgaaggttgagagtttttctttcaggaacttccattagattttttttcttgattagaaaatggagatttgaagaagtctacggaacattacaagaaagatcactttaaattaacactaagcatgaattttgaaaatggtagaaagtttttgaaacaaaactttggaaaaaaatttataacaaaagtgtctgagcaaaactgagaatgaaatgccaagatatttacttttgtactcttgactatgtcggcatggttaacaactggttcgttccaatggcagaatgggatactttgggattgcctataacaatgtttgtatgtggcacggaagcaaaaaacgtgaaagaccatgctctagagggtgcagatatataacaggagttcacgtgcgttgtgtaaagggcagctacataacaatataaggattttaattcgataaaaaaatttacaccaaagaagagctttagggtgatgggtggtttttaaaaagtaacttaaggctaaattaggaataataagtgtgtatatttaaatgtaggcatggcaacagggacgcggtttttgcttataccgcccttgaccccgcctctaaaaccccacccttgcctttgcctctgaaaattgcagggttataaatttgcctcccacccccgcccccgcccccgaaggggatcgggtttccccacccccacccttgtccatcttgtttttcctaatttgttttttctacttcgtttatgttggtatggattcatcatagaaaaatatgtaactactataaatactggattcattccgaaccaacaaaataatatatatatatatataatcaaatataagtatttcccgttacatataattttaaaattaatatataataattaatttgttatataaaagtttgatattttatattaatattgatatgtatcattaaacgtataaattaattaatatgaaaacttaataataattttaagtttgattttcagatatatagatttgttaaatatttgaacataattatcctcaatagaatttagatgaagtttgaaacaaaatataaacaatatgatacgtcattaattatactactgaatatataatagtataaaataattatacttcttgattaaatctttttcattcttttatttttttctcctcgattattttgactaaattctcatattaaacattatcgttcttgatatgaaataattgaataacaatacaaaacgcatgcctacaaacacaaattcctttccctaacagaagttaaaagaacaaaaactaagagtttaatttttatatacatttaattgatataaaattttatagatttcaactaattaaaattatccttaatttttatatattttaagttctttattatgatagttaatcaaattatcagactcgatatatatatataaatgataagtttaaaaaaattatattgttaaaccaatcaaattaaattaaaatttaactaaattattattatgcatagtaaatagtaacaaaggtttaaacaaataccattattatttgtgttactatttgacaaataggtgcggggcgggggcggggcgggtaccaacattaccaaaaccgcccccgaattcagcatacggggaaaaatcgaacctgaacccaagtcaactcgattttttccccatcaaaatcggggtgggtgcgggccgatgtgggcggggacgggtgaagttgctatgcctaattaaatggggtacttgtctttattaatagagataactattattattaacattgtgtaaatatggacaaatgtcaaatgaagttttatactacctatgatacatagttattttttcttattttattataggctaaaatatattttttgtccatgtaaaatacccaaagttcagatttagtccatgcaaaaagttttgtttgcttttcgtctccataatactataatgtgttactttttgtctttgaattattagattcacatccatctgaatatgtatgtatgatgtttgtccactgaaattaagatatctatatgatgcaatccaaacctatttttctttccatttctctttctctgtctaacctagccaccacctctcttcctctttggtccctttttcctctccgtttcaattcaattaagcatatactacgtacgcaatggagttcccttcttcttactcctccatcttctccccatgcccatcagatgacattattttccacgttgtaaaccctaactccaccaccacgaccctccaaactacaagaaaaatgttgattcctaatggccaaaatccgtcggcaagaatgaaaatttgtcaaacaaaaatccattggtcaaatggtcatcgaaaacatttgtcaataattacttatcgcaaatggtaaacattttgatggatatgagtccgtcagtaaataactgtcaaaaaaacatttataaataatcttttgaatatttatgtcagaaatgttcacattaccggcataagaaaatttgttagtaattcaattttatcgacaaacccaaatttgtcgataatttgactttttattgtagttttcccatcccttcaccgcaaaatccttgaaaccatatctcccttcaccgaagactacatatggcaacaacagcccttcaccctctctgtttcaacttctctgaacctttcatacccctctacttcagcgacaacctagacgagtagttcatcgtcttcctcctcttccaaatctcccaacgcttcccctcactctcactccaaatctggaactctgacgatgactacctcctcattgaggttgccttccaccttccccgttggctcaaccccgacactatgaaaacaatatgaatacacacaattaaccaagaggggggtgaattggttaaaacagggtctttaaatttttttaaaaacaagcagtagatttaggatcatatcacaagaatatccttttgaataataaattttcaattaatcaagactcacccttcacagaaagcaatagcagaaaaaaattatttgttgatattcaaatgattatccaaaggactagtaatcaatgacagaaatatgagattgagagaaaataattaacacaaagagctatattggatcacccctcaacaagagaagctacatccagtttcttctaatcaaaccttggctagagttccactgttaacaaaatttgttctttacaagcttacaaatgatcaccctttatcaaccatagataaagaactgaaatctaaaatcttattaggcttctaatgatcaagacatagagaatctttctctattctttcctttagagaaccctactctagaaaagctttaaagaacccttttgaaatagcaacttacaagctgaaatgtaaaaacaaattacacacaaaaactaatagagagaaacaacctgatgattcatagtgtatgaatgcatatgattagcaatcttgatcaaggttgaaagcaaataagtttcagaccaaactctctaagggcttcttaaaatcttgtccagaagaaaacctttcaatgaaacatgaatgttggaatttgtggacaagagctttgttactcagagtatctcttctcacttcagaaggcttttgaaaactatgagaattcataatgtaatgatttgataaaatcaaaataccaatagttatttataatagactgttgtaactgaatgtaatcgatgaaatcgtcaatgtaattgatttaaaccactaatgtaatcaatttaaaataaattcaatcgattaaaatgttcttaagctttctgaaaaagatatatgagcaaagtaatcgattatatcaccatgtaatcgattaacacagatagttttatttttcaaaacgcgccaattaattgattacgattagatggtaatccattaacacatgaataacctattatgtattttgtactatgtaatcgattactgttaccttgtaatcgattaattcgttcttcatggcttaagtaatggattaccaaattctggtaatcgattaagtcattgtaaaaaagtagttttccaaaacttaaccatgagtacttggcttctttatgcaaacatgaaaccattaagctttttcacaaaccatgtgatttttgtaaaatcataaatgcatgccaataaatgatgtttatgcaatgcaatacaaaagatcataggatgaaactcttgaccaactaacaaattacaatatcttcaattaaatgtcatgtaaaaagctaaaacttatctaagttaatgaatctcctcatcttgatcctctttcaagctgcccctgtgtctaacacactacacatcatcgcctcttcctctgcaatggatgcctccacattctgtcacgtaactgcctccctaatccctccctgctcgattttgtcaattttatagctagttcccttcatgaatccctcgcctagaatgcaatccaatgcatcataaaaagcctaaggaatttgcaaatttgttttctaatatttaaagaaattgagattttgatggtttgaatgttctttgttattaatcgtgaatttgtttatatttgattttgggttagagatttttagatttgggggttagggatttgggcgttggaggctgtggttgtttagttgagatgcggtggctaattgttatattttttattttttaaatttgggatagttttatctgtcacaaattacattatgatatttttttctataatttgttatgatttttaacctcataaattaaattttaaaatttaaattaaaaaagtgttatgtaagtttggattcctttaaatttagtttcgagaaaaaaaattatatattttaattttacaaaaatgaaaaatgaataatttttttttcaaaacctaaaaataaactttaaatattttacaagaaaaatataacatattttaacctttattatacgaatcaattaattatttaatttaataactttatcctcaacatgggttcactttgtagttgttcataaattcggtttagattaaaaatagaaagaggatatgcagattgagagcaatggaaagaccagaggactgcgagacagccaggtggaaggtcaagtggccacgccataatgccactacgtcacctacatatttatttatcccaattctccttaaatatcgagcacgtatactttagtggctcttccgtaattccgcaccaaatctgctaacattaattaaaaacttataaaatactatttcatataatattttattatagtagtactaaaattatcatgacctctttccaaaaacaattatctttaccaataattaaaattattagtctaaacaatattaaatttgatctctttaaataaaattttaaattaaatattatagttgaaaaaattataattaaaaaaatcataatttataagtaaagattaatcatcaataaaattaaaatactttataataatatcataattattgataattgacatataaatattccataagtatgtaattggtaatctgatgatcatatttaagtgtataaaataatatttgttttttctaggaaaaataatatttattaagaattgtcaaaccttaaatatatctaaataatgataccttagactaaaaaatatatttttcaattataaaataaatttgaattaattttaattttgatacaatatcaatgtaatatattttattttgtaaacaaattaaaatttactttaaatatgagtgtaactataattaatcattaaaaaaaataatgaatatttcgtatcaatgcataatgataaaaagaaatattaaaattacctttaccaattaataataacttaaatacaatatgtatttatattaaatatacataaaaatcagataacaaatatattcgtcatcaacagatagttagtgattccattatcatgtttaagtgaacaaaataatatttattttacaaaacaaaataatatttcttagaacggtcaaaccgttaaataaatttcaatatctgaatcaagataacatatattcaaaaatacatattagtttcaattataataaaagttgactttaattttgatacaatatcagtgtaacatattttatattatttataaattaaaattactttaaataatttataaattaattattgtaaaaaataatattttttaataaatttaattcaaatacattatcaatgtaaataactaaacattatttatattgtcattcactcatttattgaatttgtcatgaatgattgttaatctttataatgattattttagaagtttaaattatattctgttaattaataaaaaaattattattagtatgtttttaaaataattattatcaaaattaacaaaattaacatatattacaattatgattatatttatatattattgataaacaaactttttattctttttttttaaagttatatgaaagataatttctaattaattaaaagtgcaaaaacatatataacaatgcatcaattcaaaattaaactcatttttaatgagagcaacaggatgatgtactaatagcatgaaatattttatatattcaatcacaacatatttatgataaatttgttgacttttaaaaatattataaaaaataatttaaatgatgatatataattgaatgactgtacataaaaattaaattcttttagttatatgattttttattaaataaatgataatgtaacaaatcttcacagtttcaaatcattcattatttttatacaatttaaaattaatctctatccattgttaatatagtaaaaattccacacacccagatagctaaaaataatattttcaatacaaaatttaatattaataaactttctaatacataacaaacctagtccatggtcaaaaaaacaacctagtcatcagccaggtgacacttaggcgagaatttttatttttaaatttaagttctaattatatcccctttaaattcaatatttttttaatttggtgataaataataaaataatggagtagatgagatatgcataaagggttacgtgtgcttcaagccaaaacccacaacccctctctctccttcccacgaaccttttttccactctctcttcctctctctcttaaatactcttccgttgattgctttttgcaccttgtgttttgcaacttgcaaggaatccaggaaccggttcaagttttctgaggcgagtttcgtcatcaccctatttattgaatgagttaattgcctcaaaaaaagaaggaagagtgatagcatagaagagatgcgaaagtccttcaaggattctctcaaagctcttgaagctgacattcagttcgccaatacgctgtaaaattctcattactctttacactctgcaatatctaccaatatttttttttttaaatttttaattttacaatggcttttaatgttgaattgttttgattctgattagtttcagaaattctgggatatattttggtggtaatggtaattctttattttattttttaagaatgaagtttttgtttgttaaaaaataaaataatggacagtgtcccgatccaaagcagagaaagcctccgtttttaatgaaagattccagatatttacatttagttcactcaaagagacgagtgagtattagaacctgtgactaataagatgcgagacctttggagtagtttttatttatttattattttcatgagacaattagtgggtgtgtagttctgaactctattttgctgtgtttgactaaacagcaagagtgcgtgtcatttaagttttttattttttattatttattatttaatttttcaccaaatgttaaacggttgtcggaaggttcagtgaatagagcctgaagagtacaaagatttcatatcatgggtgaagcaaagcagaccttagattaatagatttggttgaaaaatgtttgttatgacataaaaagttctaagcaggctcctttggttggctttaaatgtgtctttatttcaacccctttttcaagtatgttttgcttttgtcattttctatgttcaacactggtcgcacgcgctcgtaagttgtaactgtattgtcattttttttctttcatgttgtaatggtaggtgctttttggcaaaattcaaggatacaatacccaattaagataattgaagtgtatctttatctttatcattttcttttccctgtttttattggtaggtgcttttatgcaaaattcaatggtacattgcctttcactttttctgtacaaataaactcactgttacgcctgcttttgtataggcaatgtaagtttctgttgtcatttctagctttcaattttggttttatttgactgttgtagacattactatttttgtttggaaactaatgtgtaagacttgtgttagtggcacatcataatgagataaatttacatgggaattcaggatgcgtccttgtgaaggctatatagaagctttatataaatttttgagtgcttatgcctgtgggattctggcatgaattgaatctgttagatgttaatgttctttttctctatatttcaactttcaacattgaaaattttcattatataatttttaacgtattctttttgtgcaaaccttgtttctgtatagggcttcggattatacaagagaatgtgatggccccaccgtacaaatgagattgtcttacagcccagctgctcaatttttcctttttctggttcagtggactgattgtcatctcgctggagttttgggattgctgagaattctcatatataaggtgaatttgctgcccctctgctctattcacatgcacgcgcgcacatctcaatattgacctttgaaagtatctctataaaactggtaattcacaatcaaatatgatagtttagaccggtgcatccattttattgtcaggcttgtaatgaagtgttgggattgtcaataggtatatgaagatgggaagacaaccatgtccatttatgaaaagaaagccagtttgaaggaattctatggtaagtgaatagttaggttgaaataaaaacagtcaattttggtccaagagctttagcataaatagcaccaaatcccctgaagtactgtttgtcctttggattgaatcctagattggatatttagcctgtgctttattcaccatccacttctccacactaggaaaaaaaaacttctttttaaccctaaaggaaagtcaatttcgaaacgatgtcatatcattgtatgaaacactttgatgattttggctctcctttagaaaagtggctcaaattccagatacgattgcttttgcactcttttaacaacaggtgtgatctttccctctttactacaactccacaaaggaatcagtgatgtagaagaaagaaaacagaaagatttatgtgcttcaaagtaccagccaagagatataataagaaaaggaaaatcatctgaaattgatatagagagagaagaagaatgcggtatttgcatggagatgaacaacaaggttgtgctgcccaattgcaaccactctttatgtatgaaatgctacagaaactggtgagcaaattgtgatttaaatgttacattatggtatggatctcatattgtctccccaaaccttttgcaaacctgagtcaataatggagaaaatgcttctaaattctaatgataaaatagtaatgattaatgaagtttagagttaaggcaattttaaatcttaagcatttggaattgtaatttaatagatattgattgatgcccaagaccatgtagttgtagggtacaagtacaacagaagcaggttgattgtttttattttaggcataatataaaacaatatgaaagaaatgagctgccatttgttagaatatacaaaaaaagtttatcttttctgtaggtatgcgaaaagatttgtcctaatgaggtaatttaactgagcagaaatattaggcttctgagttatttgtaagattctttcaaatgtgattaacactttggcaatgctattctgctgacattgtcaccacttctaatgatttaagttttttgttgtttgtttaggcatgcacgatctcaatcttgccctttctgtcgggacactcttcaaagagtaaactctggtgacctttggatctacatgaacagcaatgagatagatgacttagcttcaatcaacaaggagaatctaaaaagactatttatgtacattgacaagttacctctaattgtgccggatcctatattcatgtcctatcctcagcgctttcgatttttccctaatgaatttggatctgcatgaacagctgtagaatttaattaggccacttatgtacattgacaaattgcctctcatggtgccagatcctgtgttcatgtcttaatcgcagcacttctgatttccctttagtgatagataatttctacttcaaattccaattggtgtttgatcgtcagtttgtgctggaatgattcaaaatgtaaacacatgttgccttcatagtgaaataatttacttttactccattgaaattaaattaaagagttctctagtctaaaagtcttgtttgttcatatgagttagttcatggtgctagcagtcatagtttttctccacccttaaaatgttggtcttagacacatcttccggggattttataaggcgatgcgcgtgtacttcagattattatgcaattcaaaataatactaaaattgatactttattgaattttgtcaatttgttttttgactgaaaagtacttatctcatttcattatgaatcaaaatgctcgatacaagtaaacaaatgattaatagagtagaggctagggaacaacaaagtcatccttgctagctcatgagttagtccattaactacaatatttttttaattctgttaggtcctcacgtgcagtaccaacatgattaaaatttattgcagctactaaacaaagagttgttaatagaccacatgcttcaccttcttgaacttctatgcatggttgtctctatgatgtcattgctgaaaccaagctctgttgatcatcatgaacacacaaactggttccggtggtattgtgaatcatatgaaagttagaattcacgttgtatttgagccatgcatgttctggttttcatcagccttcaccgacgcagttttgcgtgtcaattctctcaagatcatcttttgtctttgcacacttccaactctggtgaaactcttcctctcttctaaccacaaactcacttgggacatccttgttttctcaggccttgtcattccttctcctctatatgcttcattgcaagataaccatttgatctttcctttcttcctgcagctttgaaaacaaggtgaagaataatttcttacatgatttggtctataacaaaacctcctctaggcaatggcttatgttgtgcttcgaccaacaatcttcatttttttgtgcatgtaaaaaacgtgtgaatatttgtctaacaaacaatgagacactgcacccctctagaattcaaagttgctctagttggaatgcaacctctacatatcctccacatcaattttcttactcgtggaggaacattcactttcataatcaacctccaatcacaaggtattgctaggtgttcattatccacttgctcattcattatcactttgtatgcactttttactgagtagacttcattcggtatatagccttatatcttggtgtcttgttgatcaacattcaacaatggtgttctcaagatgacctcaacatcttccacttcaaaaatttgcttaaggagaatgcagttccaacacaaagcctctttgttcatcaaaacactccctttcaaatcctccaagccatttacaagtgatgttcgaatcattgcatgacccttgttcctaaaccacgattctccccaagcattaaccttctccccattttctagcttccacctcacaccttcctttaacaccgttttggaaaacaatatgatgggttattacctaagtcagcacccataaaatcccctttagggaaatatttgactttgaatactctaattgacaaagcattgggttttgatataaatctcctcccttttttttctaatatggccaagttgaaagcatagatatttcaaaagcctaagccccaagctcttttgagacacataatttgtcccaagctaggcaattcattctcttgattccctactactcgacccccatcaatatgagttcatcgtcctttggatttcatcaccaagagttgtaggtataaggaaaatgctcatgcaataacaaatttcaccattacctctcttcctgacattgataaggtcctcccactccaagaatttatttatttttccacaacctatccttgatgaagttaaaaatagccttcttgatccttcccacaaaaaaaagggaaacctagatatttccctccaccatttcctttagtcacccccataactgatatcacatcattcttcaaactttgttccatattcctattaaaagtgactttagaattctgtagattgatacattgcccagatgcctttacatagttatccaaaaaatttctaaccaccacaactctttttcattagcattaaaaaagagaaagctatcatctgcaaacaataagtgaaaaacaacatgagcatccatacaaattttaaccacatgcacatcacccttcttttcttcatcttttattaattcaattaatcctttaacatacaatataaaaaggtaaggggagagaggatcccccttatgcgcccctttgtggagtaataggcccaatcatttcatcatttacattaacataaaaattcactaaagaaacactaagcattatccatttaacaaagtttgtatgaaagtcatttttaatgagcatctcctgcaaataaccccagtcaattctatcatatattttgttaatgtcaatttttaatgctacatctcttttcttttcccttcttttgcactccataaaatgtaaattttcacaagcaaccaaagcattattaataatagatatactaggaacaaaaattgattgttcttcaaatataaaatttttcgggacctcctttagtttattagcctatactttagacaaaattttgtaggtcatatcacataaggagataggtctataatctttcataccttatggacatttactgatccaaaacttttaaattgtgggggcaatatttatatgcataatcaatattttagtttatgaatcatagataaatgtttattttttaaaaaaatgtttaatttagataactaaaatttaaataataaataataatttttaacatataaatgacgttataattaaaattcataataaaaatatacttaaatatataatttatattttgaatttacaataaaaactaattatgatttaagattatttttaactattgataatttattttgaaaaaaaaatattgaaattttattgaaagatgaagataaaaaggtagattttttaaatgatagacagttaaaaaattcaaatattatatatgtgtaaagataaaagaaaggtaatttaaaatgaatgagagaattttttttaataattaaaatatattatataaaatacacataaaaaagaaaaaggaataatatataaatgtttaattgaaagaataaaaagattgaaactaaaaataattttgtggggataatattcatattatgaatagacctattttataattatacatacccattacataaataaaaattgaaaaattagtgggggcaatttcccccacaatgcttaacccccatccgtccttactcgtggatgattaaccttttgaattagagtgaaggtggtatcattaaccttatttaaaaatgtatatattgtttaagttggaggacattgaataaagagaatgaagcacccaaaaagcttaaagactcctcatgaaccatccccaactttgtccaaccatgaagatgaggtaatcatgcatcacacctttatttatatgaagtatcctctgacacagatagtcatttgtgacctcattattggtgcagaggcatataaagacatcattacaccactctgacatgtcaagagatattgtggtgtgtcacttgacatgtcaccacatcctaatggatttagtgaccatgtcaactaataaaacaatgttggtttgatcgttatcgagaaatcttcgtaccatagctagggactctcgagtgtgggttgttggttggataaattagatgcttagccatttggtcatgagggagaccatttccttttgtctacattaatggacaagctcgatgtatagggtcgaatagtgtttttgcaattaagtctaataggcacaacttcttaagtgttttgcaataggacaaatattgctatgttgacctcaaaaaggtcaatttgatgatccaataatagaagatattcactagtaataaaaacatcatttatatatatttttagtccgtgttagttttttgttcatttttagtccttgtaaattgtgctttttattttagtccctttaataagatttcaacttttttatttatagtcttcataaatttgcacttacaaatatcaaaattagaaaaatgtcaaggactaaaaatgagtaaaatattttacatgaaagacacaaatttacatagactaaaaatgaacataaatttttacaagaatcaaaattttaaaatacaaatttataaggacaaaaaatatgtttaaacatagaattatttaactaaatagtctattatttatgttataaaaaaacagataaactaatcaaattgcttaataggcaccaaacaagtatggtcccactctttttctctttcattttttaatttacaaatgattttcgcacgaaagaaaaatggtaggtgatttggcgggtgtggagtacacagaaccaatggatcttcacttcccacgagccataaaatatatatttcaataaattgtaatataaagtttgaatatatatatatatatatatatatatgtatgcacatataaattcatatatgatagtattattaaaaaaacaaatcatattttatcatcgtacattcgtatatttaaataattatatgtaaatgattaattcttcacacgtaacttttttttataacgaatcatttcgtattaaatagtatgtttgtataggtattataaaaatgtattttgttatatcttttatttttcctacaataagtaatttaattattattgaatgcttatttttatatttaaaaaatttaaattagcgttatttttaagttcaaaattttcattttaaatacgaactactttttaaaattaattatttttatttatttataaatttaatatttttagtattttctaacttttccttaaactgaaaaatataaatacaatcaaagttaaaaaaaaaaaaaaaccttttttcacttgtcaatcatctctgtaagttagaatatacaatttagagaatgagatttttttttcccaccatctctattaattcactatttatattatcggactctattctttcatttaagtgtggctttcattcactatcattagagaatataataattttctcttactctctttattttcacatgatttttttaattaaattataaaattataataaaaatttattaagaaaataaagtctcttatcaataaaaaaatattttttatctaatattatcttccattttctatttttattttattccttacatttttttaaaaatgatttttatcaccaacgggtcttctgttcgcacgagccataaaatatatatttctcaataagttataataaagccattttaaaatcacatattactatgacatcacgcatttaaccatcatcatttgaaatcattttaaaatccatgacatatctgatatcttgatacatattatgtcattcctaaataataagaataattattttcaagaatcataaatttaataagaagaaaaaacaacaattatttttaagaaacaaaattcactatatttataaaaaaataaaaaacatatccaatctaaaattcataatattcttttcttctatcttatcatcaattcaaaattttagaaatttcacactccctttttttttttttttttatttctctccaaataaagcataaataggcaccaaccatgcttaaattggcggtcctaaactatacctaagtttgggccaaccaagctgaaccagtggagttgtgagggaactaaacacagaacactaacccacgacaccccaaacgagaggaccaaaactaaacacattccgttacatacaaataaaaacatcaaaaccttattaaaacaaaacatcaaaattcaaaaccttttcaacaacctcaaaacgctgctatctctgcttctccactctccccaacaataacatggccgtcgttggcgtcctcgcgctgcaaggatctttcaacgaacacatagctggcacgttcatctttcccttctttctcttatgttttttttcatttaaattttttggtctcactcctcattcactttttcaacaacccttttgttttttatggcagctcttcgaaggttaggggtgaaaggcgtggagattcgaaagccagagcagcttaacacaattagttcccttattatccctggtggagaaagcaccaccatggctaagctcgccgagtatcacaacctggtcgctttctttacctcttttgtttttttatttttatgtctattcatatttgtgttattgttcttaatgaaatattgtattggcaactttctatgtctctattttgcgtagactgaaaaatatttgccttttattggaaaggaatatttaaagggtttattttggtttgagtgtgtagattagagttggtttggttgtgtttttaagtaagaagaataagagagaaatttgactatttggccataacaagcactcatgtctttcagacttagcacttgaggggatgtggactgtactgccagattaggccgaccgagttatacaaagtaaaagtcgagttcctaaggttggacaagatggtaaaaaactttatgccatggaccatttaagtgggctgacaaagccaaaaaatttgaagaacttagtcccaatactagcgttctagagccttctatgacttgagtaggatgcaatgtgcaccactctatgtatgcaggcacgtggaagcagcacgatatgtacacccctgatatacggcaggaaacggttatgcgagccgttagaggacacataccataaataggtgtgatttgtacctcctctgttaggcctaggtcacgcatattagagcttgctgaggtctcttgagtctctctggctttaggattcctcatggtgtgctgttttggcattttgtttatttaaagtttgttttctatagttggtatgtgtcatagttaccaggtgtatgggtaggtgtatgcggtttgtgtaggcatttggttcatgactttttacattattattgtaagacttactttaaggagaatctagtatcttatatgtggtatggtgcattcagcatagtacatagggttattgagagaattttgtaatatggcatgagtaaaggtgagagagagaggagaatgatggaaagggaaccggtttttcgggattttgcatgtttggttgtggttttgaatgagtgaattgagtaatgctttgaactttaaacactcttaacgttataactttatgcttggaaccaagtgatgattttggtgtttgctgatttatgttggatgttatgatttttcagtttcctgctttgcgagagtttgtacaaatgggaaagcctgtttggggaacctgtgcagggcttatattcttggcaaataaagcaataggtgggttgtttctgtcttctcctttctgaccttatgttgaattttagacaacatcaggtatcttattcttaatattttttctcacttgaaaaattagataatattttaaaaaattaaaatgactaacattatttcaggacagaagactggtggacaacatttggttggtggacttgattgtacagtgcatagaaatttctttggcagccaggtaaatgcatgtgctatgcattttaagctatagtatattctatgaaacaaactgttgacaaccacaacaatccaaatgtacatagaagccaatgttaattgttggacatgaaaatttcagcttaaaattctttttctgggtgggagtgaaggggcagggtcattcttaaatggcctaacatttaacatggtagtttttcttaatggtgccaatggagaactattgggggctctacagtcatagtgactgactcagtcataagggatgctaattaaattcctagagaagcttttaatactctcttcctttcctcttctacctgcttccttcttgatcaagtttcttattatctttaagcatcaaaactaactaatgtaccctagtgcccaaaggcttctcgctatgctaaggtgtggctgagggtcattgtatgcagccttgtatgcaacaaggttgcttccggattcgaacatatgatctttaagcatcgaaatctaaaataattgtaaatattcagggttttacaagcagtgttattaaatagcgaccatggtggaatagcatggcggatttgtttccaacagccataggatatttgtgaagggaggcccgccatggcggtgccataaggtgcaatggtgtgtttatatggcggaattttggccatctgccattgataactttaattacatgtttattttgccaaaacaaacttctcttgttttacaacatttaccatttgtgtcattataattgttatttgttaagattcatgaatttctatgaatgtaaatatagaatgtgatgcacaaagctacatgtaattagtgaagagaataatatgcttggtttgaggaacaaatttttttgtgcactttgataatttggataacatttaactaaactatatacttatttagattcaaagctttgaggcagagctttcagtgccagagcttgtctccaaggaaggaggtcctgaaacattttgtggaatttttattcgtgcccctgcaattcttgaagcagggcctgaagttcaagtgctggctgattatcctgtaccttctagcagattgttgagttctgattcctctattgaagaccaaacggttagttaataaaatagctgtctataggaagctttcagctttccttgttatgaatataagataaaaaaataagagtgctatgtatgtgattttctaacttgtcttaagttttgactaaattggaaatacgtgactgactcaaattttaaagtgtgatcatttgtcaattctagttttaggttgttagtggtcatttattccagagccattagaatctaaaagatttatgtatgatgaatgagtaatgaaaacatgcaagaatggacaacatcaaagatacattattgatataaagatccaactaggaatggggaatttaaggtgtatgttctgtctatgaaattgatattttgaggattgaattttaatttagagcttttttttttatttttttgagggggggatattaaagccttgtcctgtatttttccaagtttcatttggttcagtcgcttagtttgggattctagagtttcatgtgagcaaatctatgtttctgaataggagtggataaagaaaaggaaattgtttgtggaaatgaatgataactgataaatatactaatattcaactcttattagttagggacactgttattcaatgatcctccagtctttggaaatttccttgtttatatgcttatcctctttggaaaagtttcctacttttgtgaaaactttacatcatagtattaccttataggatatttagtttccaacccaatatgttgcttcatcttcatatacccaatgaactactgatataccgtattaataggtttagttgtgtatattaacatggattgctgatcgaccatagcctttcagcattgtatgttaaggctaatccgtatttgcactattaaaaaaaataatgccatcataaaatggtagctgagtcacatgctcatactagcagcacaaggtggctatatagaaatgaaaactgtcttggccagatggtgtagtatatatagcatgcttctggaagtatttgctctggttatgttgctttctaggaaatgttcctcggatgattagttcccttaatgaagaattagcatactctgtatttccctatgtgttatatgtatggtagttttatttcttaatcttacggcaatggatttagagatgcaccttaatctcgttgtttatgctattttagttagaccatccacaattacttgatggttaccatactgccgtttaacttatttgcataagaggcctttatgtttgttgcaggtgatttaggaagaaatcatgtaaagtaatgatttcaaaaccaatcagcatttgataaacaaatggtctaataatatgatttaattggacatttaaacaaatggtctaatgtaatggtctactagttagcttgacaagattgacacttcttaacacttaacaaataatgtttcctgctataacccaacagctctaattttctctttccaaggagtgctaagaacacactctttgacacactcctttatacgcactctatctaattggttaaaatttattgaaaactacaaaatcaggggaacaaatcaattaaatgtgatttgagaccaacaaattgtcattttcaataaatttcaactaataaaagtgtgttgaaaaaagtgtgagagagtgtatttctagtatttcactttcctattaagcagttttaatactaactgcctgctagttgccactggaaattaatcaactttactacaacgtcttggtccccccccaattaattacctcatttcatattagttttggatatgacaggagaatgctgaggaagatagtaaagttatagttgctgtgagacaagggaacatattagccactgctttccatcctgaattgacagctgatactcgatggtagatacaagttgtttttggcttttgaattttacagttttttatgatatcgagttataaacttataaccatttaattattcaggcatagttatttcgtaaaaatgtcaaatgaaattggagaagaggcctcttcaagtagccttgttcctgcacaagtcagtagtacaagtcaatatcaacagccccggaatgaccttcctatctatcgataggaccagaatactccccaagactttcttgaacaattgtggatgattttttttttcttctttctatatttattttctcgaacatgttatataattgttggatcttagaagatatagctagctgtttattattcttttttctctttggacaaacagtattgtattatagactttgatgttttctgttaagtagtcatctatctgtcaaatgttcattccagcattttctgatggtcgatcaaaagtagctattagctatctttgtgatgtcatgctgccagtttctccagaatccaaactctgatgtgccagcttatgaaatttgaatatcatctagtttttattttctttttctttaggccatgtaacaaaaactaggaaaaaatgttaagcttttagggtatttactagataatggtccttattaagtggaaatggattcagtggagaaacattttgtcaccttcatgcattcaacacatgggtaaagtatgtttttcattcctaaactttttaatgactgatgaacgtcttcaaactttctttttccgttcattgttttaatcatttttgtctattttaaatgttaagtaatgacatggtgtttgtttaattattattttattttattatattttcttgccgttaaaaacaagcaaaatggcttccctagaaagaaagaaaaaaaaccaaacttccaaaaattcttactgttacactcatatttcctcaacattcccactcgatctcaaacaatcgtgctccaaattttcacattccaaaatttgagtttcaacaagcatctccaaatcaagctcaaccaagggtcaatctcatcacccatttctcaccatctgtgcactgaacatctttgaacacctcattgtttttctcctacccatcttcctcaccacctcaaaattgtgttgaaggaaaaaagaggaaggagaatttgttactcccattggacgttaagggactcgtagtcccaatattcattgggccaaatgttgtcatcggcatagaccttggccttggaggacgcatcggggcaaaattgtgagatggtggtttcgattgtggtaaaatagtgagttgaggattttgatttggggcaaaaccgagtgggggttttgatttgaggaaaaaatgcaagttagaggttttgatttgggggcaaaatcatgcttgggtttgatttgaacgcatgcttgggtttgatttgaacgacgacctcggcactgatgttttttgatttgcggtggttcaaggttgtgtgggtttcaactcgcaatggttcaaggtcgtgattcatgagtgagttttgtcattggctctggttctaaatcttgtttgttggcgttgttgtgagaccatatttggtttcacaccatcgcgagaccgcgccagctttttcgtcggaaatttaaatgttttcgtcgacttgcaaacactttcacattatgtttcagcaagatgttgatattgagaatccatgttacaattcaaagagattttgtttttcttgtaactattattattattattattattattattattattattattattattattatatttctttttgattttggctaagattctgatttggatttttggattttcaattttggctaaagtctgtgtgagtttgtgcatatggttcgtataggtctgttgttggttcttattgggaattagttgaacaattattattaatctttttatactattttattcatttaatttttgacagattttaatcataaaaaaataaatgtacatcatcacttaacatttaaataaacataaataattaaaatattagatggaacaaaagtttgaggactaagattaatcaagagttcaagacaaaaatcaaaaaaatttaaaaaagaaaaatgtaatatatccttcaacgcatttataattgttagatggaggtcaaattattgagaagtactataccaaaaatactctaccaaaaaaaaaatattgagaattttttattattattcataagctattaagattttgaaggtgtgttttaactcgattgaccgggataaaatgagtcattcgatctttaagctttttgatcataaaggggtaaaagaaaatcaataattaccatatgggggtggctttcaaattatttatcatttggaggtaagtcgtgccaagtagtaggacttctaaatcagaagtcgtaccacctttcacgatctttatatttttcattttttttaaagtgaagtcgtaactttatttacgatttcattgtgcataatttgttttttgcgttcaaaagtcataaatgtatttacgaatttaaagtcataaatattcaaactggattttttttcttctgaaagttacgttcaaaagtcgtaaatatatatacgactttaaagtcatatatatatatatatatatatatatatatatatatatatatttacgacttttaactattttctttttcttttttatagctttatatatattattttttttttcttaagtatatatatatgttacggattcattatatgggcttgaaaatgttaatcacagaagcccattaaaggtctaatgcttcaggatctaatcaacaatcaaggagatctaaactatgcacgtaaaaatcactgaagagtatcacaacaaataaagatcgtgatctcaacagttagatattttagcctattaaaccggaagaaggtatcagcacgtctagagataactcacttataaataggcattatattcatggagaaagatacacgttctctctactttacttttccattagcactacacacacctcacctcaattggctggtattatagtacataatgatcaatatttctagaggtattttttccataaatacctagagagagcttttgatcaacgtcctagcaattctgctagacactcctattcgtaaaagcagaacaacatatattttgttttttaattttatattaaaatatatggatatatattaaatattttataattacttttatttattattttcatttgtttcattgtgaagttttttgattggttttgagtttttttaattaattttaaaaatagataaaagtagtttaattttattatttaaaaatgcaagtaatttagtttttgtaatacaatttaatattttgcaaatattttaaattattttattaagtattttagtaatttatgttatagttactttgaattacatttaatatttcaattaattttgtaaatttttgtagtaatgttaaaatttaaatttttagagatttattgtaggatgaaaatattttggtaatcattttaacttgtaaaatatgaaataacatatatttatattattttttaattaaatatattgattttgttaatgaattttaataaatataattatttctactttttttagcacaatcgtcgtaattatttggggtatattttaaaaatattaccatttggaatttaagatttaaaaagaaaagattggagtatacataataaaaaaggggttcaattagcgagtttcaatttttactaataaacttataaaaaatgggggattcatttagcaacctttaatgtagagcaatcttcctgcgaggtgcaaaaagcaaaaagaaaaaaacactacgactttgagatcatatatttatttacgacttttgaacataagaaaaaaaataaaaataataaataacaaataaaaaatcccagtttgaaagtcgtaaatatatttttgactttaaattaataaatatatttacaactattgaaggtaaaaaagaaattatacaccgtgaaattgtaaataaatttacgattttactttaaaaaatgaaaaaatacaaaggtggtgacaggacttaaaagtcatatcatatcatgtagcataacttacctccaaatgacaaataatttgaaaactactctcatatatgataattattgatttttttacccctttatggtcaaaaagcctctctatctttagcagtttttaattattgaatgcgaagaaaggtgaatgcagaaaacctagatccaagacctggcaatttgatggcccttaaaatctgccgttacctatttgtgaaacatccaaggctgtgactggaagttggatttttgaagggaagtgagagtaattttttaataaatattttaatttaataaatttatttttaaaataaactgatctatttatagatcattttaaatttaatattttgctctcctttatttttataaacatcatataatttaataattaacttaattaaaaataaaatattattatgttctttcttttcaaaatctcattcccaaacgggcaaacgcatctttaagaattactttctacttttgcctactatcaaagtgttaccattttattatcagaaaaacgtctgacactgaaaaacgtcctttaatggcaccatctgtagtttattagaaatttttgtttctacctttcttgataagcactgtcatgttcaacattacgcaaattgcaaaataatttaatgaaatccatcaaaacactagcacaaaaacctcattaaatcataaaaaccaattcaatcaacatctattgctatagcatccatcagtctaaatgaggggttatttggacattagcagggtcagcagcgaatggacacgagttttagtaaacgaggaaaatttgaattgtttttgtttagtagtgttgatattttaattggtaagatttgcggtgaatgatatttaaaatacttcatttgtttgaataccaacaaaaataaatgtctggctcctgccataaaaaacttctatctataatagccaagaatttcaataaaaaataatgagtaatggaagaaattaattactactttagcctcaattaaatacaaaacaaatttgttgttaggatatatatatatatatatatatataatttctatatttcttttttttcctactcatccaaataaataatatgattcttttttatttctgtccattttatttatatatatccaaatgatacaacttttttttaccatatttttcttttatttattttttctttagttacctcatcatccatccatacaaaatgtcaggattagttttaaatatttaaaattaataaaattttattaaaaaacatttattatacctttgtattttgaatcccaagtgtataatccttaattgtagtttgctaacatactcattataagaaataagtgagtgtatcttcaccaatcctataaatatttggtaatgtatattgtacactactccctccatcccaaaataagtattatcttaggttgctttacacaagtcaagaaaagctaataaatacttcctcttttcctaattataaaactctttcaattaattcacatccttaagaaaagtagttagtttagctaattacattaattttgtcaattatttgtactttcattttaaaattatccttttcttatagctcttttcacttaattgtttctcattaatatttagaaatataataattaagtaagagcatgtaggaaaaaataattaatacatctagaaattagaaaaaaagtcttataaatgggacaaacaaaattctgaaaatggttttaaaagttgggacgaaaggagtagatggaataaaatagttttacaaaactaaccttatttaatagatcaaaaaatagtattaatgttagattcaaaaattaaagtgacctttattacgagtattggtggaaaagaacaattaatgttataataaaaaaccaaatattattttgggataatttttttaaaatgtaatacttattttaggatggaatgagtatttgatttttaaaaggagtacggttgcaagctacactcgaatgtatttttatattagttgaatttataatttgtgaacgtattcctataaaaacatgtggatgtacgttaacaaacctctttaaataaagataaagataacatttgaatcacttcttagttcttatttatattttttaaaactttaacgtctgtaaaaataaagactcttctgcgataacatagagattgaagcaacctctatgctaggccatttggctaaaaggcgaggaagggaatgtcatgtttgattgaaataatgtttttttttttccaactttatgaaagtgttatctcatgatccactcactcatattataacaatttgctaaaccccattaggctggcttaatagtgaaagggttgaaataaacgcacagagacttattgtcaaaaaaaattctaaaacagatataaatgaccatgaatcaatcaattatatgagtgtgtacaagtcattctaattcttaaaacatttgctcctagtactgctggacaaccgcaatgagattaagatgatagtaagtttctcgtgtatgcaatgaaaagttgatcagaaaatgataattccatttatactaataactataattctgacaatgcatttacatacatcaacatcaacatcatctttaactcaaattaattgggatcaacggtagatgaacccaatgatagataaaaaataagacaaagaaagagaaagggaaagtaaaagaaaaaagtagaaatacaacaaaagagagaaaaaaaaagctaaaatagaagagaggtgaaagaaagagggaaaaaaatgaaagagaacaaaaacaaggaaacaactgaaacataaaattactaatggattgaaccctccactaagcttataacttttcccattcctttctaagacatactgtcctccaatctatatctcactccactaggtcttgtttaactaccttttcccatgtaagtttcaatcgacctctacctctctttgtgtcaagctcttcgtaacacacttttgttcttacggaaacatgcagtggccgtcttataatgtgtccaaaccacctcaatctatgctccctcatcttttcacatacaaataccactaatacctttcgtcgaaaatcctcattttttatcttattcattttcgtataaccacacatcccctttaatatcatcatcatttatgttatccctattttatgctcatattgtctatgtgttggtcaccattccgctgcatataacattgccgatcttacaactattctatagaagttttcttttagcttaagagcaattttgtagtcacacaaaaacctcgatgcactccgtcatgtaagcaaatgcatttatcataaagaaattatattacttagagcaacccatgtaaggctacaatgcacaaatagtgattcaggtacgatagctagctgagggaagctcaagtagttggcagtatatcatgccaacaaaagaagacattcttttctaccagcacaaatataaaaaagtagcctagtatgcacaaccagaatatataatagcctccctcacaaacaaaacatcataaccaaggttttggacatcaatctcagtcatcatcttcatcgtcctcttcctcctcatcatcctcgtcctcctcctcttggtggtcctcctgtacaaaaaggaacaaatgagctaaaaaagcaagaaaaaaaagaggaatggctttaagcttttgtaatcaaaagaatacaagttttgctgaaaaattaaaaaacagcatttatgcctctttaaactaaggaacccagcttctcaacttattgggaagctaaaccatcgtagaggccttagtacaaaaacaaaaggtacaataactactaaaacttctcttgatgaatcaaaagagttataacaagttaataactactaaaactaacatactccattgccaaaaggctcctcgttatgcgaaggtatgagtcaaaagggttaataactgccatagtaattaaattcattacatttacttcttgagaaaaacttctttatatctcatatttaccctctagaactaaaatcttgaaacgaaagcaactccactcacagcaattatacataatattcattcagttcaagctctccatcatactcaatattcaaggaagtacagagaatatattctaagtaacataagtaacagagaatgaggaaagaagactacctctccactggcatcatcttcatcattcacttcagatttggacttgtctgattcttcatcatctgcggagcttgcctggcaacattatagaaaacaaagtatataaacacaagacaatcaaagtgccacacgcaacagaacaactggcacaggttactgaccttctttttatcataagctttgatgagtttttcatactcagcttttcttttcgcagccttggcttcatatggagctttctcctttgcatttcaaagagaggagtaaaaattaataaaaaaaataaatcccttcttcaatagaatgagttcatttggtacatatatattgatattactggaattcaaattgaagcaacatttgcttacaaatgagaaactatatctacttaaaaataaatttatattgaaaacatctaaaaacacagtgaagaagagtcaaataatttaaaagacgacaacatgagccattatttatcacaattgaaaggcttacagcactggacaaggatttccatttctctcctccagcttttccaaccttcaatcaaagagtgcagcaaacaattcagacgcatattcaaaaagggcacgtcgtcattgaagatgaagcaatttaacatgtaacttacaactgatacagccttcacattaggattctcagccttaaaggtcttcctgaactcctcactatcacagacaaggaaagtaagtcatataatttttctgagggagagatataaaggaaagagtaaagaagatacaaacaggaacacaaagaaagcactgggtggtcttttaggcttgttggggtctttcttggccttcttctccttctttgctgcactacttctgtcaagcttaccagaagccttccgctttccaacctttctgaaaacaatagagatatatgttccatcactacattatttcctgtaacagctggatgcaccatcaagtttgtatgatcagatattaatataatgtttcgatattaaaaaaaaatgcgctagaaagccaacgccctgaaggacaaggagatacaaatttatatgaacaatcaactaatttcacttaatggttatgatacatccactaaccggtcatcaacaggcttcagtgattcttttgaggccctcgctgctcccttgccctttgcattcttcattgttcaagttcctgtatgaagacaatctacagcaatcaaaacaagggagtaagaaaattcccaaaaaaaggggacaaaagatagatagaacttcaagaagttaaatagcaaaattagctcaatacacaaaacatgatccccactaaaattagggtataataaatgcaccatatggtgttacatatctacctagcaatccagcttatagaaattgataagtttgaggctttgtagcaacagcataattctcacacacacacatacacaaactatggggttaactactgatctctctctctctctctctctctctctcacacacacacacacacaaactatggggttaactactgatctctctctctctctctctcacacacacacacacacacaagcaacagcaaggccttcccactaggtgaggtcggctacatggatcatacgatatcatttggcatgattaaaaaccaaagttacagaaatattatggggttaaggttaactgatgcttgaccaaatgttacatatctacctaggaattcacattgtagaaattcatatgtttgagattttgtagcaccagaataattgtcacacacattaagttgacttttccatcaaaattcagaaatcagagacagtctaaattatgatataacaatcaacaaaaagaagcacataaaaactcctcaagtcatataaatccttccccttgacatgctttgaggccacagtaaacaaattcaaattaatatatagagagagagagagaacaaaattgaaaagcatgaaaacagcaaatactatgcaattttctcctcctaactcacctttttttttttcaactcctcaaaaaccataagccacaagaaaaatataaaaaaagaatcaaacttcgaattttctcatcttccaaacagaaattgaagtcaagaaatataaccccctaaagaaaaaggaaatttcttttaaaaaagggggatattattgaagaacaagaataccttagaaagaggaaaagaggaacagtgaacttacacgcgaaacagaacaaaacagagaacagagaatcaaagctaagacagtaccactagcaagagagagacagagagaggctgttggaaactaaagaagagggtgcgacccaatagagaacgaaacggatcaaagcaaccggatctaccggttaacttttggagactttggtgccttgcctccacacgactcaacccgagaattggctttcaccggccacacccggttgccactcgacaaggatattatgcttaatttaaatatttaatgattgctattgattttcaataattaccagctaaataatttttgtaagctgcgaccgttattattttatatcataatcataattgactgaaatttgcctataaaagggcaccaaagtgttggtgtttaatttgggccagataaccacgatatttggatgggagagtaggtggattacacttgataattttgcgaggagaaaaaattattctacttatataaactttttatttagcggcgaggtctagttaaattggtaaaaaaaaattccctaataagtattcaatttctataaataaaaaaatataatttttatttaacatttaattagtttaattttaagattcaaattgatctaatttcatctaatctaaaatgattttaatctattctcacttttgttttattagagaaaaataaatatggatacctcaaataccaattaacacctagtaataaaatagataatatgatgtgatagaagataaaagagtaaaatgaaaggtattaatggggtgttaaaaataataaaatatttaaatatcattactattttattaaatagtgataaacatcaataaatggttagttctagtcaaagttaacctgatgtttttgaattagagtcttttggatgaagatagtttgttagaataagagatttcactaaaagtacctagtctagtcagggtttttagcataaattaatcgttgataaatatttcataatattagtttagttaaaaatgataaaccaattatattttacctcttttatatattcttttatctaaaaatatttttaatatagaatataaaaagactatcataaataaaatatgaaatataagaaaaactaaaattttaaattagtaatattttatatggtttcctatatttttagaagataaagaaaaaaaattaattactcatttgatccctattgttataaaaccttttttagtccctatactaaaaaaaactctacatatgtaatttttaatctttttagttcctatatatataattttaatctcattaaaatgctttattaaataaataataagtgaatatgaaaacttaaaaaagttatagtaatttatttaattttcattacctaatgacctaaactaaaataacctgatcttaattgatttggttcaaattgatttaaagtttatattagactagatcaagatatcaactagtgttattaaatgattatttgtagtgatatatatataggatactaataacaagtaaatataggagagatgacacatcatttagagtgataatcatctgcccctattagaaggtgaaaggagatggagttcttgtttgattgttgaaaaaaagcacacaccatgattgtgtttgttatgcaataacacgttttaatgaaagactcgtcttttgcttttaagataagggtaagatcatacatccataattgtccactttcaacttcttacaggttaatccttcctataagcacggggcaatatgtttgcgtaggagttaggacctcaaaatgcagactcatccagtagcgccatgtctcaacaataggcacccaagaacaactgccatttgtgttgcgtcaacaagcattgttgtctcttgccactttttctctttctactctcttataaactaaagttgtggaaagttcttaaactttaaatgtacctacatcaatgtctctcttgtgagaatcttggtgagaactctccaacaatctatggccacctaaaaatatttttggcggcattttgtacctaaaagttcaataatagataataaaagtttactgaaataataatatttaaaaaatcaaattattttttaatacataacaaaacaatgaaaatacattttcattgtgtaccaaatctagatatataataaaaatgtattttttttttgtataaaacttagatacataacaaaaatttgtattcattgtgtatgtatggatgatgaaaacaagttttaatttgttacatatatcaatacaataaaaaaagaaaaaaaaaacaaatggatgatttataaagctcactacaattcagaatgaaatgcaatgttatggggagcgagtgtgaaatgtgaaagggtttaactttggttgccagtgatgtgacggaggagaaaaggggtgagatgcaatgagagagggtgaagggggtgagaattaaaatgggctagagtaagggaaaaggtggataaaatagtaattctttacattaataaaagaatgaggcgtgaacttagtacattgagtaatacgaataacagggcccaagtttactcctcatcattttgaaaatttgcaggcccatttttcattttaactaacatgcaaattttttttaagtggcatgcccattttgcaatttgacaaaactgtttgaaccttaattttattattataacataaaataattaatacactattcagtattatatatactttttattatatattttctcttttcaattatatatatatatatataatatatttcaaaaatactctcttaaaatttaaagagataacaaaagttattctactttaatcacataaaattagagttttaattgatcacttatataaagtaatgatgatagacacttttttattctaaacattcatcatttttttttatctttctcattctatcatattatatattttaatatatcatatttacatttttgcttttttctcctttcttcttcagaaagggtcatataatttttttaaagagagtatagtttaatgaatatacataagtattttttaaagttactgtcctctttatttgttttgtattctaatatttttatttatctctgtcacacacgtatatatcttatttattattcttttttcataatctgtaatctccctttctcttaacctgtatatacaaaaaagaaaattattttttagagaaagaaataaaaaatcaacccaacctaatttatctcattattccatttggcactaccatatactctatccctctcattataattgttgtatgaaaaaaatatttattcaaaaaattattattttaattttaatgtaatattaattagatttttttacttatatctattataatactaaaggtgaacaacaaaatttataaataaattaatgatgatataagattaattttatattaataattattttcttttatttattatataagtaaaataaacaaggaaaactattattttaggatggagtaagacatttatgtaactgccattaatttttctacgaatcctgtactttacccaacgaaaatatcaatgctgcatcagataatgctaatacaacaacgtcacaaatgcaacacaacacgtttatatgggaccaaatatcaatcagaccagaccccaaatagattatcggagaattaattaatctcacagaaactcattagattttttttgtccaaatccgcaatccgaaccacccaaccagtgtggaacagtgaaccagcaccacaaatttcccacgtatggcaatcaccatcgggaaccccagcgggtcccacaaacatcgccacgtcaccacctccagataaacataacgataagtcgaaacctcttctctaccgtcagatggatactcttccaaatccaacgtccccaaacccgcctgcacagattatccaatctcccatccctcgtcaaatatatctcccatccatctctctctcacaataaccactaattctcccaacactatttttctcacaccaggcgcacgttagcacaaagctatcatggccacagcaacagcagctgccacttcgtccttcatggggacgcgcctcctggaggcccaatccggggcggggcgagtgcaggcccggttcgggttcggcaagaaaaaggccgcggctccgaagaaagcttccagggggtcgggcccagggtccgacaggcccttatggtatccgggcgctaaagcacccgaatacctagatgggagccttgtcggagattatgggttcgatccattcggactcgggaagcccgcggagtacctgcagttcgagctggactcgctggaccagaaccttgcaaagaacgtggccggggatatcattggaaccaggaccgagctcgcggacgtgaagtccacgccgtttcagccctacagcgaggtgttcgggctccagaggttccgtgagtgcgaactcatccatggaaggtgggccatgctcgccactctcggagctctcactgttgagtggctcactggtgttacatggcaagacgccggaaaggtacggttctctgctgttactttttttttcctccagttatcggacatttctactttctatcgtttgatgatgataattagagagatgataatcacacactctttctagtttaagaacaagatgatccactaattaagaaataagattcacaggttagatttaccttaattgtgccaaacttaagagtctattagtttcagtttggaatgtttttaaacggttttggtgtgtttgtcggaacagatacatgcctttgttttgttgtgtaatatggtcagttcctttaattttgtgtttgaaatcatgaaaaactaccgtattttaaaatttaatacttttatgctatgaagtcctgaaatattgacttaaaaaagtcctaaaatattattttattaatttaaattaatttgtatgtttagaatggtctaaatattaattaaattcctttttcttttttctaattttacgttattattccagtctagaacagtgaatcgaaagtcctattatatgttttttaaatatatagatttaattgcaaatcaaattgtgtcccaaaccagcagaatgcagcaattatccattctagagtatgcaagtggtctatgtcaatcggttaaaggaatgatataaatttctgatatctgtattcaattattatctcacagtttttttttttttactacaatccattcacatagttgatgccataaaaaagtgagagttagctaataaatggaatcaaagaaattatgcgtgttactcttttgatagtagcatataatatatatgacgtgcctcataactaattatgaacttgctctttgactttaaggtggagctagtagaagggtcatcataccttgggcaaccacttccattctcaatcaccacactgatctggatcgaggttctcgtaattggctacatagagttccagaggaacgcagaactcgacccagagaagaggttgtacccaggtggcagttacttcgacccattgggcctggcctcagacccagagaagaaagccacccttcaattggcggagatcaagcacgcccgtctcgccatggtgggcttcttggggtttgcagtccaagccgccgccaccggcaagggcccgctcaacaactgggccacccacttgagtgacccactccacacaaccatcattgacaccttctcatcctcctcttaagaataagagtctttcttgtgcctcgtcactattactagtatattgtaaaagtcttttctattcttcttcggctttgggttgtaattaaaacttttcacttagctggattagtagtacttgtgaaaaacttgtaacgtgaaattggagaggctaagcagaaatgcttctgcttgatgttaattgttttcctgtaaatgttaattatgcacgaaatcgagagggaatgacgaaggtaaaaaaaaatactgataaaattgagatcactatgaaaggtaatggcagggaattggattgaggccattgaagatcttaatttattaatttgttaagtttgattctagatacgcgctgatttactaaaagtttgattctagccaatttgacaaagtctcttgcattttaattagcgtagggtaaatacttaaatttgtgtgagaagccaacaaattggcaccctcagtacgataaattagttttaaaaaaatataattcatttttaaattagttctttaatactataatttaatgataaaacaatcttataaatttaatgatacgattaatttgtcacattttttatatatttaaaaattaaatttatattttttatttttaaaaaattaattcatgagtgtatcacacttttgaacacgaattttgttatttggtgaaatttatcctactaaataaaataccattgaatcaaataaggcgtgagtaaataaataaataatggtgggaaattgatatacatgacttttattattcattatagtaattagtaattgattccacaatattttttttcaaattcaaatctattaaaactttctttatccgcttaaactttgatttgttggcttttttcttttttataattttaagttttgcggttgatccgattaacttttcatttgtgataaataatttcattttagttttattagtttttataattatttaaacttttatattaagctttaaatcttaataaaaaaattattgaaattagtattcctaaaaacaagaaaatatttttacaaataaagtaaatctgtttatgtcagttaataaaaaattctgaaatcatctaaacaatacccaaataagctagaaataaggcttttgctagagttatagcaataagagcatatgcggcaagagtgcttctacgtgtcgattaaatttacgtaatgttgcttaataaaatattttctcctgaaacacatgattggttcataccaataaaacttaagtgagtttgtttaacaagcaacattatttaactggttattattaataaaaatattttttcaattacaaaatttaatgtaacttaaattaagtatttattttaataatttgaataattatttgtgtagaattctcaaatctatatatcattttaagatttacaaatttaaaatagataatttatttgaacaatcgtatattatagatattttacttgagtgagttattgataggattgaaattacctattcccaaagcttgtcccctttccttatccctccaatcatgttatgccacatgaattaataaaatgtattttaaactttcacatattaacgttgttaaacacctccattagccaatcactgatccctccataacccaaccaccgacagagattggcattgccacgccaatgacgaaaatgaggaaactgagtatctcaccgtcacgagattgaagaaggcaagcaacatgggaaaatacagtgggagaaagatcggagtgggaacgagatcagcgacgatatcgtttgacattatttggtttcaagagaaatggagaacctactagtgaaagatcttgtgtgtgtgaagtaagcctaaattttatgtgaaggattttgttttaggaacttagtctttatttactaagaagtgctagtgctcaaaagttactttgataaatttttttatacagtggattaattagaaattattctaaatctaattttaaaaagaattattaatttttttgctatataataatttgatgactgtaaattatatgtcatgtaaataattgaatcttattacaattattttgtatatttttattagaaagaataatcataagtagggagtgatgattgcacgtgttggttttggtctattatataatagttttagtttgactacaccgtgaaccccatcgttactcgccgtcaggggcggggcaaactttgataaacttgctgagggtcctgtttttctttttttagaaaatggggccctcaattgacaatttaaaaataaataaaatgtaaaaattattgttgataggaattgaaccttagacctcttggttattaaaaatagacattaccatctcctctaatttttaatattgaacatatgttgcaatactaaataggcattaccatctcctttttggttactcgccgtgaatcgtagcaaaccccaccgcaatgacaaaaactgtactataaaccattgtgaaacccacacgaacccatttgctcgtggccgtgcatggtagcctcgtggtggtgttgtgaccttgctatgacgttgtggtcgtgtgaggtcgtgtgtggcagagcaaggttagttgtgattggtgaggttttggtttatatcttggtgaaggatccaaatttaggttgtaggaggcagaaaaaggtcatagtgacacagaggttgttggtggtgttgtgaaactcagaggcgttggtggtgtcgttggcattgtgcgcaaggtcattgatgattggtaagggttttgtttagatatgaatatgggttgtagagaggaaaaaaaggtgaatgtgtcacgaaggttgttggtggtgatgaactcgatgacatcgatggtgtcgttgacggcgttgttcgtcggtgcccaaatgcaatgaggcggaattgggaatggtaggtcactaggggcagagaggaaatggggtaaaagaaggaaaagaaagaaaaaagaaaatagtaaatagtaaaattgaggataaattttgaatttttttttcgggtaatcaaggcattggtagaaagttgttatgtcaaaaatagtgtcatatcttcttaagggaacttgaatacacacaatttgaatatgttgctcttaacatgatttactttatattcgacatgatttactttatattcgaggatcaaccatgatttgaccttgagtcactcacttaattgaaggacacaaatcatttataattatttcaactgttgttggtaatgagatttggcatttaatttataaaaattaatggttttttaaaattattctataattaacttaataactctatttagcattttgtgttattagggggatgaaaattataatttagtattttaggctatatacaataagggttgagtgaatattgatgagttgttgatttatattactttattattcatattttattcattataattttgatcccataaaatattttttaagaaattcaaatattttataactttttttcccggaatagttcttatcttatttcattatgaatcaaatactcaatacaagaaattacatgatcaatagagtaaagactagggaacaatgaagtcacccttgcctaactcgtgagcaactctgttagctagtctcttaacaaatcttattctataggatgaatgagaaactaaaatcttctacactcaacaataatatttctcaaatctcttcaagtcttcacagttgcaatatttatcttgtcaattaccattttgcagtctaattcaaatgctacatgattaaaacctcatgcttgatcttcttgaacattcatgcatgattgtctccacgatgtcatttctgaaatcaatctcccttaataatcacgaacacacaaaccattttcaatggtattacaaattatatagaaggtagaatccacgttgcatttaagtcattcatgtcctgacatttgccagccttcaatgacgcgatttcaagtattaattctccccagatgatcttttttctttgcacacttttaactatggtgaaactcctctccttttctaaccacaaactcacttggggcatccatattttctcataccttgtcatttctcctcctccatatacttcatagcaagataaccattttacaactttctttacctgcttaaaatttgtttttttttttgggcatctctttaatgattttatgttttgcaaataatccgattaaatttgtgataaaaaattcattttagttttattagtttttataataatttcaacttttatattaaaaggttcaaatcttaataaatttttttattaaaattaagatccctaaaaatagaaaatctatattacttttacaaataaagtaaatctataaatgacaattaatataaaattcctgaatcatctttaaaaaaacccaattacggaaagacttttgctagagttatagcaacaagagtatttatttaacatttttttattggagtacataatttgacagtgcattttttttgttaactatatttaatgggtcgatgcatgatatatatttttttattatacaaatatcatcacttcatataaaaaacaagtttaaatatgtttttatccttaatatatatctggattttttatttgatccctcataaatttttattttgaaatggattcctaaaatttgaaaagttttgtacgaagtccctgccattaaaggattcgttaattgcagatgtgaccattaatttgaatacgtcgacaaattacctgtgatgccacattggattaggtatgtcatataagttgaccacgtgtcatctgacattgcatcatattttaattaaatttaaacaaaaaaattaaattaaaatttaaaacatgcccattcatccattccttgcaagcagttgcaaaagggtaaaaaaaaaactcaacttggcaatagcccttcgacttcccacttgccttctcatcgaaaaacttcacctccttcacaggctcatacttactaagctcagcttcaagcttagcatcagtagtccaccaatgcaaatcacccacgaataatatagtaccaccagaatcaccatcaccaccaccaccaccaccaccaccaccaccacctccaactcctccaatattaacactactaacaacacttacattgttcctaacatcatttccaccaacctattaacattccctcctccaccaacaccaccttaaccttgtctcaccataccctcattttccacaatcccaacacctccaccatgtggttgctgtccaatcccgtgcactgtaacaccatcatccctaccttgttcctcaatttcacttaaattcccagattggttccctaattcaaccctactcccacctttggaacccaacctgttccctctaaacccttcgttttgaaacccatcaaccctccatgttgtggttgggttgcaattgaggcaaaagagggggtggcgggtactgtagtcgatggtggttgtggagttgcacaaaggggcttggggctgctactggtgtgcgccgatgacaaggttggtgagaaaggtggttgtgcactggctgagaactccgaaactatggagaagatgatgtacaaacttgagaacactgcaaaatcttttagaaccttcgactcatgagagagagagatttggaaagaccaaacctttccactgccaaacccaagctccagtagagagagattggggctatttaataatctcaccttttcatttatatataattaaaatatgatgtcatgtcaattaacacgtggttagcttgcatgtcacacttaattcgatacaagtagcttgtcgacgtgtcaagttagcgaccacatcaaccattaatggatttctacttatgacaaggacctcgtacaaaactttttaaattttatggactcatctcaaaggaaaaatttataagagatcaaatgcaaaattcagtgtgtatatatatatatatatatatcagggatcaaaaacatatttaagcataaaaaataaaaagaaaaaatgaaaacaactttaatgtgcatttaaagaaacatataatttaaactgaggtaaattactgtatattgaataaataatttatgatatgcaataagtttaacaatttttattaaatattttatgcaatcataataattgagttaaataatttttaattctttagcaatgttttctttctaattttgatcttattaaataaaaattatttatgacatagggtttgttacggatataagaatatcaaatctctgccataatgattcaaatattcacaatatcagactatatattgagagtatcaacggatatattgtgatagtgtaaaaaggaaaagattgcagctacatctccagatatccaaagataaggtgatgggcctgaacaagatcatcttcaagatccaggttagctccctataaattcagggttccccatggtgaaaggtacacacactctgactctctctttccattcacacggcacacacaacacccgaattgctcccgtgttcgttgtgatcatcccttccattattagcttcctctcaataaacttcttgggaatggagagttcgatcagacataaaatcatccaacatcctgtgttggacatctccgtttttcttgaacggaacattggcgccgtctgtggggacaataaatttcgaatcccactaactcgcgatggttgacaccagaagacaccaaatggcaaggcatgaagaaccacccaggaacgcaattccagagaacgttgaaccagaggacgcgctctcccacaccgcctcttcgagaccagcaccagacaacctaaggcaggaggaggatcctgggaattctcagcactttatccaaagcgccctccaatccttgctggctcagatggagaatctggaaaagcgctataaacttcagcgccaggaggatattcaacgacttattgctcagttggaagaacatagtaacaggcgaagggaggcagaacgtcggcaaaataccgaccatcgagaccatgagaacggaagacaaaggtctggtacatcgatccgaactgccggactggcaatagggaatcgacgtgctagtccgaacatgagaggatgtccctctctcaccaaagggctttccatgccgcctcagcaatagcaccgaagcccggaccaaccgaagtcattcgccaggccgaccaaggcgagggcatatatcgaagaaaatatcgtcggggccaccagaacaacagcccgtttgccgaccaaatagaggacgctcagtttgtagaggacttcgacgggtcattcctatccaaatacgatggaagccaggacccacaggtccatattgatgaatttgacatgcagatgtgtgtgaggggcatcgacgagcccatcatctcacgtatttttgccaccactttaaccggagctgcccagacatggttccattcattgtcgccgaggtttatccacagcttcgaagatttcggccagaagtttttgctaaactttgcaaccagcaaaaagcagccgaagtcggaattcgccttaggaaaaatacgacagcaagccggagaaacgttgcaaagctacttggaccgatttaaggaggcggcattgcaggttcaagggttagaagagaaggtccatgtttacctcatctcagccggactcaatgggtcgtctcgactagccaagtcgatttataaggaccccgtgagatccttaaacgagttcagagtgagggccaagaagtatttggagttggaacaaatggaaattgccaactcagccccgagggaaggcaagaaacccgtgtcaccaggaaaccgacgtcaagaatacatgcatcctgggcagaacagtcggcagccctcgaacgttcctgctggccgacccctacgaggcctccccgactctcgcccgaggttaggaagatatgaaccaaagtatgaaaagtacaccccgttgacagccccccgcggtcagatatggaaagaggtcgctttcaacgagatgaggaaggtcaatcgacctcccccaatagtgaagaaagagggattagattacttcagatactgtgatttccacaacagcccgggccatacaaccgaccagtgctgggagctcagagatgctatagagaagtttgtgcgagaaggcaagttacgacagtatgtaattcaaacccaaggcaagagaaaagctcagcaggagaataaaccgcgagagggaaagaagaacaagaaagatgaagaattccccgagcccgaattcgagtgcaacgttatctttggcggcctaggaggcggaggcgacaccgcagggcaaagaaagagatacctcaaggaggtaatatcggtaagagaccgatctcggttcaaggagagcagcggcagtggcgggaaggccgagccgcccttactttacttcatgaaggaagacatgaagggggtcgttccaggccatgaggacggccttgtgattacggggacagtagccaacttctgagtcaaaaggatatttattgataacggaagctcggctaatatcataaacatggcggctttcaaaaagatgaatttgagggttgaggacttaagaccctgtcagacaatgctgtatggattcaatggggagggcaccggactaaaagatgtaattgatcttcagctcaccttggggacaagggaaggatttaggtcggaaagagtcatgtttacagtggccgacttcccttcaccatacaacattatattgggaaggccgaccctacacaaatgggatatcttgatgtccacaaaacatcagaagatgaagctggttggacaccttggaaaggtcatcacaatctgcggcgaccagaaagagtcaaggcagtgttattacaacaccattcgggaaaccgagatcggcccgtcttctccgcctcggatccgcgagaaagagacgacgaattggccgacagaacgagtcaggagaccagttaatttggtagaactggatatgagagacatcgaggaatggaggccagagcagatggacgaacttgaagaagtccaaatcggatcctctcccgaccaaatcacgaaggtaggaaagcaatctgattccgaaaaaagagatagattggtacaatgtttgagaagaaatcaggacgtttttgcttggaaggcttcccagatacccgggataaaacctactttctgctgtcataaattggccgtatatcctgggtccagaccggtggagcagaggactagaaagctaggctcggacaggaagcaggtcctggtaaagcacattaacgaacttctagaggctggattcataagggagatacaatatacgacgtggctctccaatgtcgttatggtaaagaagcccaacggaaagtggagggtctgcgtagattataccgacctgaacaaagtctgccctaaagactcataccccatgctgagcattgatcaactcgtagacagctcggctggcttccgatttttgtccttcatggatgcatattccggatataatcaaatacccatgcattcggacgatcaggagaaaacaacatttcgaggcatggaggcaaattattgctacgaggtcatgccctttggtttgaagaatgctggggcaacttatcaacgaatgatgaacaaagtattttcagaccaaatcgggcgaaatatcgaggtctacattgacgatatgattgcaaagacgtcgacgtcgggggaccatattcaggacctcgaagaaacatttcagaaattgcgacaacacgacatatgcttgaacccgttgaaatgtgcatttggagtaaaggcagggaaattcttgggctttatgttaacccaccgaggaatagaggcgaactcggacaaatgcagagccgtcctggatatgcggtcccccgctaacaaaaaagagattcagcagttaacaggaaggttagcagctttgacccggtttctcccaaagtcagcagagacagctcttcctttcttcaagttgttaaaaaaggaggccagcattgaatggagctcggcatgtgaagatgcctttaagaagatcaaagcctgtctggcctcgccgccagtattatcaaaacccgagcctggggaagtgctcatactttatttgtcagtaggagatgaagccatcagtgccgttttggtcagagaggaaggcaagtcccaattccctgtgtactttgtaagccgagctctcaagaactcagagctgcgataccagaagctcgaaaaagtagcctttgccctgctcacaacagccaagaggctccgaccatattttcagagccatacgatcgttgtccgaacaggtcaaccgatccgacaggtgctgcacaaatcggatttagcaggaagaatgatgaattgggccatccagctctcggaatttgacataaagtacgaagctcgaagcgccattaaatcgcaggcactggccgacttcgtcgttgagctaaccccaacgtcggccacacagaaagaagaaggagtatggaaggtctatgtagataggtcgtccaatgcaaaagggagtggagctggggtcatagtggagaacccagagggcgtgtcccttgaacagtcgttgcaacttaacttcccgacctctaataatcaggcagaatatgaagcactcatcgtcgggctcaaacaagccagggagcaaggagcactgaaagttaacattttcaccgattcacagctcgtctcagctcagatcgaaggtcagtatcaggtcaagggacctttgctagccaagtacttgactaaggtaaaggaagttatggcagaattcgacgaggtagtagttgcccacatacctcgagaggaaaacgtctgagccgacatactatccaaactggctagcaccaaaggaacgcccaatcacaggtcggtcattcagtaggaaattgctcaacccacgtgcatcatgatcatcctgaccgacgacgattggagaaggcctcttatagactatctagagcgaggaatagtccccggcgacgagcaagcaacaagaaaactcgagcgggacgctgcgatgtatgtgacattgaggatgcattataccgtcgaggcttccacacccccctactactatgcctcggctcggatcaagcggagtacgtgcttgcagagatacacgagggaatcaacggacaacccatgggagcgagggccttggccctgaaggcactacgagcaggatacttctggccgacaatgaaggccgacgcggcagaacatgtcaagaagtgtgacagttgccagaaacattctaagatattatgggctcccccgtcggagctcagctcaattacagccccctggccattttacaagtggaggatagacctcctaggaccgttcaaagccacggagggacaaatgaagtggttggtagtggctgtcgattattttaccaagtggatcgaggccgagcctctggcgacgattacctcagctcgggtacaaaggttcttagaatgaaccattattgcaaggtttgggattccaacagaaatagtcaccgacaacgggacacagttcaccgacaacaagttcagagcgatgatgaccgacctcaagatcaagcaccatttcgcctccgttgaacatccacaatccaacggccaggctgaagcggcaaataaagtcatcttggatgggctgaaaaagcgtatgcatggagccggtccaaactgggtcgaacaactttactacgtattgtgggcatacaaaactacggtccaaacatctacgggagaaactccattcaggctaacgtacggctgcgaagctatgataccagtagaggttggccagccgtcctggagaagggagaacatacgggagtcagaagagaacgacctcctactaagggccgacctcgatttaatagaagaagtccgcgcagccgctcacagccgagatctacaaggaaaggaaaagctggccagaagattcaaccaaaaagtgaaaccaaggtcgtttgaagatggagacctcgtattaagacgagccgacatcggcaacaagaacgcacaagaagggaagttggcggtaaactgggaaggcccatatcgagttgctcggaacctcgggcgaggagtatattcgctacagacattggaaggaaagcaggtcaaatgaacagggaacgcagataagctgaagaaatactacagctgaaagaagacagtccatgtgttttcctttagctggctttaagctcgtcataggaatcatggacaccatgtgttcccctttagccggctaccaagcccgtcatgggggtcatggggaatcaacccggttttccttacatatggacctcggtttttatcacgtgtttctctttagtcggtcatgtaaaccgggcatgtatacccgtgttaattggtcatcgagatcatgaaatattaataaaatccttttaaggaaatttattgtgcacaaatttttgtacttagtcgttgtttcgtgttataattcgggcttgatcaaaccgacgtaatcatttatggatgagtcatcggctcaacagaacgaactacatctgcaaaatattacgaatacgctaaacaattgctaaagttagggaaaggattcccaagcaaagagcccgactaatggtcccggccaccaccaacgtttagccaatttcaataagtatgaaaggagggtcggtcgttggaaccgacgcccaaaaatcaaaacaaggaacatggttataaaggaacaaacgaggtacgaaattaaccttaaagagtaatgtatcttgggcatgaaagataaaaaatgtaaacactattacaaaattaaaccggcatcccgaccctttaatccgcgccagcttgaggctgaacgtcgtccacagcatcatcggaactatccgagcccccttccttgctctcggaaaccatgagtaaccgatcgccttcgacataagctctgaagtgcataccctcggtgtttaaattgatgccggggttcaggaagcggatttggctcatggcattttcgaacgaagcttgggtagatctcttcagctgcaaacgaacctggaccagctcgcccaaaagtcgtttctcctcctcgcacttcttcttgttcagtgccgagagttcatcgcaacaaagcttcaccgccttgaaccggtcgcgatttttagtaagactcgcctccaagttggctatggtggactgagcagacgaagcctcacgacgaagagcggcaagttgagctcggagggtgtcggcttcagtaattaacctagcctctgaatcccgggcaactcgcaggtcggcagtcagttttgcttccttgacccgagaagcctcgaggtcggccgacaggttggtaaccgaggactgtgcttcccatgcctcttcccttgaagcctccagctcggcagaaagagtcttcaccaaatctccagcctccttggcttttgatcgagaagcttccaaatctgcagtaagcttggccgatagcgcttgcgcttcctcggtcttagcctgggaagcctccacctcagccactgaggtagccacatccacttgggctcggtccagctcttctcgcaatctctggacctcggccctcgcagccccgagctcgatcgcccccctagaggccttcttatttagagagaccaaactcccaagcatactggccgtctttaggcaggcaagttgcatggaactcagctcctccaggtcggaatccggatagagggccacgtcaaaatatttctttggggctcgaatgacctcgaacacctcaagagtgacgccttgatcccagagagagcgagggggcagttggacaagctccttgggtgaatcgggcccggtgcttgggactctcgagaaaatttcagcaccgagagtagaggacgggatttcaagggtagccctgacagtgtcagccctaatttcagcggcgacccccataacctcggccccagcctcttcaagggcggtagcagcctccatcatatcaacatctacaacctcaactggggaactcggccgagcagcatagggaggactcggcagagaggcctgaggagagatcggccgagaaggctgaggcgaagacgaatgagaagcatgaggagggctcgatggagaaacgtgagcagagcccggaaccgaacccccagaagcatccgtggtcggggctgccaaggaaggagctcggcttgattcgccggctttactcctcttagccaccttgcgcctttttcgtcctttgagggcggcaagatgaggaggaatgggaacaacgtccatgtcaatagctgcatagcagaagcaaacaattagcaagacactaattaaaatactcaagcagtcaaaagaaacccaaactaaccacactgaatataatacgatatgggacccaagttcctggaatctctgtatgataatatccgagccgtagaatcaacgtcggaatcaaacaaccgggccttgtcagttctgtaggagatgggaggaaaatcataatgggtagaggtccagtacaaagggaaccttcaggggttcgaggagctcgaggagcttaaaaaaaagggacgacggtcgggcacggcgacaactttgaagaatttatctttgaaccctttgaaggattcagagaataagccgaatagccggcggtcaaaatccttgtcggtacgacctcggaaagaggcccaccctttccgctcagggggctccttaccataccgaccagtataaacagtgaaaaaataaaaaaacaaggggcatgtacatgggacttcgagttgttgacacaaaatttcgaaggctcggatgaaggcccaaccgttggggtggatttgagacggagcaagatgcaaatgatctaatacctgcatctgaaactcggaaaaggggaaacgaacccctatctcggtaaaaacatcggtatagaataagaaaaactcaggatcgttcccctcccgggtggaacaaatgggttcgcccgagcggggaagacaaacagaaaacccattttgaacttcaggagggacgagggcgaggctcccaaggtctaaaatcgaggtataactcaggaccttgtgagtaacccatggaaacctatttgacaaggctaggggaacgacgtgaggcccgacagcagatccctctacatttcccacgagaggcgggtccatgattacctacgacaaataaagaaacagttagtaaggtacctggaggacggagtgtcaaggggctagggcccgacggaggccggattgatgcagaagtctgcacttctacatctaaaatatgtaatggtgtgtcaattgatacaggctcacgaataggattatgacggcaccggtctagtaaatcatcggcttgtctatcaaaatccttactggccagatacataaactcatcgacgcatttcgagcaaggctcataccgaatcctaaattgggggtcaggactaggggcatctctaagggcgataccggagggaacgtaagtattggaaggtaccatagactctgaggataggataggcctctgtcgcaaggggaaccctagcccagaaggcccggctcgaagaaatctagaaggttgaagggttggtttggaggtgttaggggcagtaagagcttggagcaatgattttttcttttcttcttcagaaagagggagaccccataaccaaaacgcagactgaggaggaactgttctacggatcctagcctcctcttcgggggtatatttcatgatgaaaggacaaaatgtgcaatagtaagcgagaactacaggggacaaatgagaatggcggaaaactatcaacccagggcttgtgcaaaacaaggcaaggaaaaggaaatgacagtgaacggaaggaaaatgaataaaggcgagtaacaaatacctgaagtgaagaaagtaacaacaggaagcacaaacgatggtgaagtgaacagcggtcgcgaaggcacaaggaatgcaggaaaattctagaggaatgaaatgctatggggataaaaagtggaatactaatagggacattgagtaggaaaaaagtaaccgtcagaaattcaaaaagaaacatgggagagtaaccgatggataataagggacgtgggagaagcggctacctcattaacacaaagcagtaaaatgattaaagcgtgaaatgagaaacaatcacgtcgcgacacgtggctgagtaaaaataagaagtcgcttcacttgctggaaatcagaaccaaaccactgcttgaaaagacaaggcctagctcggcctaaaagagggaagaaaaaagcaagggaaacttctcacctcggagtgggtctgcagcatacggccacaatcattcgaggtcgtttcaacccgagggcggcctcttcaccttaggtcggctcgaccaaaggaaggtcggcatttgggttggtcggaccaaaacacatcccgaccatccagaattctaggtgaccgggctgaggggcatctgttacggatataagaatatcaaatctctgccataatgattcaaatattcacaatatcagactaaatattgagagtatcaacggatatattgtgatagtgtaaaaagggaaagattgcagctacatctccagatatccaaagataaggtgatgggcctgaacaagatcatcttcaagatccaggttagctccctataaattcagggttccccatggtgaaaggtacacacactttgactctctctttccattcacacggcacacacagcaccccaattgctcctgtgttcgttgtgatcatcccttccattattagcttcctctcaataagcttcttgggaagggagagttcgatcagacataaaatcacccaacatcctgtgttggacatctccatttttcttgaacggaacaggattaatgtttcatttattattttattataacgaattacaatagttaatagtaaaatgcatcctaatagaatatattattatttctttctctctccctacacacaagatatttttttaggtatgatttggtaaagagaaaaaaaataaaattgagataaaaattttaaattaacataaagtgtaaaagtgtaagtaataataaaattttaaacttttcattcatttatcttcgattttcctctcattccaacgtgtcctcagtgaaagtgtgagagataagagtagtcatacaagctgacaagaataattaatggtaataactattcattgaattatgcaattaaaatttgctcctctcacattcttatttttttcaatatatatattactttcatctcaaatataagtaaacctgattacttttatcttatttaatgaaattatttttaaaatatcattcatttttaatagaagattatacttaacttgaaattaatatcaagtttcaatgaatgatagtttaagaaaaaatattttttaattgagatttacacaattaaataaatttaactaatttttaataggtgtgaaatcatttatgacaaaataatgtaaaattcaaaaacaataaatcttattttatatattgagaatatgaacgagaattacattgaaataatgcctacagtttggtgcaatcggttggcataaaggagatcgtctttctatcaagatcaaacccaattaaaatgtttgattgaacaaaattgccaaatacatatggctctgcagatactccatccattccaaagcaaaataaaccctcttcaatcatgaaaaaggtttgtgtaggcattaattgcagatttgccccctcaaaatgaaaagtgaggattggtccttcaggaaatttaccacttcgaaaacaaagcaacccctcaaaccttggatcatgcccaattgattcttgaccaatccgtgtcctcatttcctctaccaaatcattataaagttcaagtggtatatgggacagtggtgaacccgaatcaatcatcatatgcccctcagaaaattgttgtgaaggattaaaaggcaaaaatttatttccaacacttatgcctttcactatgacataatattggggagtttctctagagactaaaggagttgtcactacgccttcatattctggaacttcaatctctacaccaaaattaattttgccagcaatgttgtggtcaacatgcaaagaaaccaagcattgggagaaccttttgcccccaaaacgagtaccaatttgcgagattagtgataatggctcttgatcaaatccaataattcccataaaatttccatccgaaaatttcaaattattatagtgaccacacccaaacaaaaagtccctaacaattaactgtctatcgttgaaattaaaggtagctatttcatttgcaatcacccctaatgtcattgaagtatcataataggcataattataaacacaaacattttgaggtgagcatgaattagatgggaatgccttacactgctctgaataacaataaatttctctatatgtatgggacttcaagggatcaaacattggattttttgcttataacaattagagcatggagtacattgtgtccacactactccacttccagtgtcatacacaccatatatttccactggtggtgttcccaatgtgagcctcattagatattcatatgaataatagtcatatgttaattgattgagttggttgaatgagtgagatctatgtttatggagtttacgaaaagggaaatcatgtgatgtgttgcgacggattaattggacactgaacccagcgctgttagaagcttccaatgtttgtgtttgacataagaacatgaacataacaaagaagcacaaacaaaaacagaaatttggggccatgatgtttatccctagagaatagagataccgggtaatcagtggaaagaaaacaaaatgtttgagctagggagtttaaaagtttaaacaaatgttgcattcgggagattattttacagtgagatgtggaattctcattacattaataacacatttaataataggtagcaggtcatagacatgattgacacaagtcacacaactatctatgaagagttttaattttagttcacaaaaaagagagtttgttttcatatttattcattactaaagaattttatttataaaaaattaaattatgtttaataagatattttaattaatttttaattttttactaattaaaaattgtttatttaactgttggataaataatattttttagtgtaacttcaagtgtttttaaaactttatttaaaattatgttttttaaaatgttagcttttaatttttagtttttatattttattttatttttatctttaatatatttatcaaatttactaattattatttaaataaataataatttattaatttctgtcattttatacttttgagttacttcaaaaactagttttattaataataaaaatatttttaattaccattatactcaattaaatacaaaaggaaattaataactatttaatttgaattggtaagcaatttatcataaatattatgctattcgtttttaaaatagttattcttccatattcaatttttttacataaatattattctcacccatttattcaactttctttctccttataataaatattattcttgctcattaattttaagaaacagtaattacttcttcgagaactcattaggaataaaattaaaattataattcaagaataataaactttttatcaatttccattctatcatatgcatatagatcacattattttttttattgtaacaaacaacaatgagataaaagtcaccatttaataaccctagagaactaattactgagcaaacccctgaaatccaacaaattttaaaaagatgaaataaattatatccccaacaaaaatccttcacatgcaattttaataattacattataattccaacatttgcttcttaattcttctccttccttggctattcctttgctcctgcacacaaaaaccatgtaaaaatgatcataaagaaacaaatagaaaaattgataatatcatcgttcataaagaaacaaaaaagaaaaagggagaaatgttgtttttttaatcacgtccaaaatatgttttggaggttaatgaatttccttttatagctatcgtgtaaacaatcaaattatatctcagaattaatctatttttttttttttaccgtggagccaatattttattaattatgcatataaatgtcatattagttggtttgaaaaccgaaacaatatatatatacggataaaaatcgtttagttgtaagaattaatattttgatttaattgaggatgaataacaagacatatgtacgaagttcccagagataaaatgagaaattaactatttaattgaattgagatgtttctgattaatactatctcaattaattcctcatattcatgcaaattaaatccaatttatatttggagcacataatttgattttggattaatttatgtttcacattatattaatttgaatttgatccgtaatcaaaccaaataagtgcaaagtatcaaatgatgataagtgacttccaaaactcacgtaaattctaaacttatgtttggattcataaatttattattgtagatataaatatagatattatatatgtctaacattttactcagactaaagttgtcatttctgtctttttatatcctctcttattttactttatttaaaaataaaagaaaaatatacatatgaaacgatgaagtaaagatctatagttattgtagaaaataacttatattctcatgaaaatctaatatatttactattctccgtggaaatataaaacaagaaaattatgtgtattttatattcgagaatcaatcattctttagaatattttcataataataaaaaaatccttaaaatatttttacaaaatttatacaaaatatgaaaatatgatattttcaagttcaacttcccggaaatcttgtccataccttgaaagaaacactttcttacaaaattaaaacagtatcaaatataatttgaatctctcttactgaactcctcccgtaaatgaaaagatatttttccatcaccatggtcttgtcacataatattagttgaaccaatgtgaatatgtaaattgtaaacaacctttgattattatcaattgacttaaatatattttaaatttttgtaatttgtaatttgtaatttttaatatatatatatatatatatatatatatatattaaagacttaaataacattttaatctctataaaataaaatgttttttttattttattttacttaaagatgcaattttatttgttttaatcctttttgttaaataacaatgtatagtgatataatagttaacaatttattaacttgacaagttgtaaaaagtttttgatagggcattcatatctatttttttataaactgtgttttttaattttttattaactagtctaagtataaattataattttttatattattatattaaatttgttataatgtattaaaatcacaaattgatttatcaaaaaataaaaaaataacctttttaaaaatgttaaacatattcatctacctaaaaagcgtatgtgcttattgtaggataaattttggaggccttgttacaaaatagaattttaaagaagttatcataaattctgttaggtacatataggattataaatagagtctatagtaggtaataaacaaaatccaggctttaacttttttttttatttatttaaataaactagatccatttaagaaaaatcttgttcaacttagttagcttattttcgcttctaattaaaatataattaatattttgtaataacatacatggtaaaaatgtttaagaaagtggagataaaatgaaaacattttctttattatttttttactatgatattgatacaactaattcaaccaatattcaaagtcttaacaacttaattaaaagacacaagtcgttactaattatgtcaacactagttggttttcattaggctaaattgtaattctgatttcctataatttcaaatccgtaattttagtcttcttatttctaaatcaatatatttagttttttttatttttcaaaataagtaattttggtccttttatcaattgatcgttagtaaatcatctacggtcaaacatttactttgagaagacatattgatattgctgtgaaacttatatagacaaagcaaaaagtcaataaagtaattgttttgtttagtaaattatattaatattattttctatttatcattagtaaatagttattaatttttttaaaaattatcaaaatttataaaaaatatttaatgtatgaattttttattttatttttatgttttgttttgaatagtttatatatattttttatttttaccatttatagttaaatttcataaattaatatataaattatttaattaattttttaaaattgattttaatatacaaattatttttactctgattatttacttaaaatttttcataaataagataataaaacacttattttttaattaattatattaacattatttttatgtaacattagttaagaattattaaaattttaaatttatcaaaaattataaattaaaaatatttaatatataaatgttttaaattttacgtaaataattagagtaaaaaataatttgtatattaaaatcaatttacaaaaaaattatgtaaattatttacatattaatttatgaaatttaattataaaatgttaaaattaaaataaaaaatatgtaaatgttcataataaaaacatataaaatataattaaaaagatttatatattaaatattttaaattgataaattttgataatttgaaaaaattaacaactctttattaatgatccatagagaataatgttaatataattaactaaacattttcgtgttagtgatttattatcttgttcataaataagggatcattagttcaattcttattaaaataatttttatttttacttcatttaatctttttctacttaagcgtcaaaatcacttattttgaaaaatatgaggattaaatgttttaatttaaaaattatgagaatcaatcatatatttaaaattataagaagaccaaaattataatttagatatttcttaattattgttatgaattatccataactattaatctataactaataataattagaattacctcatttgatgtacacattttggttgacaattttagtcttaaatcaattcttagatttcaaattttttttaacttatatttactttccactacttttatattattagttttttattctattattttttattaactatatttaactttttttattatttaaaaaatttagaggcacataatgcctatcgtccactagtactaataatataaagaagagtgctaatgaacactcttacactttcttttggatggatattctatgtaattagttaaaatttattgaaaattaccaattttgataagttttgtttttctaatgtttctttcccctaaatttattaaaagtagataatttttaataaatttcaaccaattacccaagaaaaaatttaaagaagaagagagaggctgcgctaatataaaacatctttataggtgaatgctaattaaattatacttttagttggggcagttgagtagtgtgaattaaaaacactttcttgctgcattgtagagtttaccttttcttctccaccacctctccattttttcaaaccacaaataaatagcaccattcttcccctgcctaacccatactctaacaccaacagcatctcttcatcacacatggcgcggtcaacgcttccaccctcatctccgatctccctcttcgtgtcgctcctgttcgtcgctttcgcgtgcgccacatcgttgaacaaaattgagcactgcgagttggattgtgcaagttccacggtggaggggctgaacgtggttggtgactgcgaacccaagtgttctcaggggttgaagattccgagccaaatagaaaaagaagggcaagacgcgatcaaagtgtatttggatagctttttcagcaacgcgctctttggcggtggttcaactgaaacagggcaaaataaggaaacccaaattgaggacaacaagggtgcgtaaatatgtaattctcgatttcttttgttaacttgcgtaatttttttaagagatgttaattttatttctaatttagttttaatttgtttgaatttaatgtctatgtgctattattgatcaactgaaaaatcatgttagatataatttttaaggtatttattatatatgactgtttataattgaataataaaatcttccttaaaaaaagagaaattacttatacaataaaatgtataagtaagagtaagaaagagaaaaaataagataaatttaaatttaaaatataataaataataagataaaagagaaagataaatatataaaaacatagatgtatgaattattataggtgtatcagtatcactttaaaaaaagaaaatataaaatcttatattaatgatgataatgtaaaacttacctcacatttatataattttgaaaatgatgattatcacgttcacaatgcattatttactctttatataacttcttaaatttagaaaaatatgcttgtaaaacaaatcaattttgctacctgtgacatgtatgagttattgttttagtcattgttttttaattgttatatataagataaaataaaataattttaaattttaaatatacaataatgttgaaatacagagaaatataaatttgctattattttaaataaagagaaatataaagagagatgtaataaatgatatcatggatggcagaaataaaacaacaaatatgttatataaattgttatatgtatctcatatctcttaaatttaattagaatatatactgtcaacctagaagttatttacaccatcatcagaccatagattgagttattgattgttgtaataattattttcaaaagtgtgtgttaattaattattagttaattaactctgcaataatttttacattgataaattaagaaaattaaactctaattttttttaattaaaagatgtagaaaagaaagaaatgagagtgtgaaaataagatgtgaaataactgaaagatacaataggagaaaaaattatgtataaaatggtcttataaagatgtgtgtatttacttttaaatgtttaattttttttgtttaattatgttgtttgaacgtaggtgagaagaatgtgaatgcagataaatcagcttatacagcgccagcgcccaaagagcctggggtagaacataagctggcaattccaagccatatagaagaacaaggggaagatgcgatcaaagagtatttggataacctattcagcaacgcactttttggcactgattcaactcaaacagggcaaaatcacgaagcacgtccagaccaccattctgtcgaacttgacagcaaaacacaaattaagcacgagggtaatctttgattcttgaatattttgttagcaagcaaatttcatggccatggttggtgtcgttttttttaggactaaatatgatctcagttctttttttcccccccaactctgattaattttgattttagttcttcaataaaaaaaaagctagttttagtctacgtaattttttaaatattttatattatcatttagagatgatatataatatgtatttggactttatataaatggttattctgagatgatatataatgtagcatgtttagatgcatattatgatacaacaagtaataacagagaccattttaaataattttaagaaattataagaattaaaatcaacataaaaaattggaggggattatattaaaatcaaaactagttataattgtagaaactaaaaacaaaatataacattttttctcaaatatttttgtatagcttgttttataattaaatgatttaaaaaacagagaaaagaagtgtgagtataaaatatgtgatataaaggccaaaaggaagtgtaaaatggtacgatggaatatatatatatatatatatatatatatatatatataatatcattttattttgttaattgcatagtctatgttgtgtaggtgagagtatgaatgcacaaaaatcatcttataaacttcccaaaaagccaggggaagaacaattgttagatggtgatattgcagtcaacgttgaccttgagattgtgggcgatggagagtatgttcttaagatcaagagggtaaatccaagtttaaccgatgaggatgaagtagaaagggctaagcatatggctcaaaacggagccatgttgttacattatggagagattcttcaagacatgggagagaaactgataactcagtcccaagcatcgctttactcagtatttaaaatccctacacctcccaaattgaagtctgatcaatgatcacaatccataactaagtagcttccccgtgttattttgtgttgtatttttatttattagtttgagattctttttaatcccctctttccatgaattaatgtttgttgagaagtattgcatcattacatgaaaatatttaggatggaaaatgtagatttgagttgttgtcataaaaatttgatatgtacacccagattggatatcgactttttatggacccaagacgaaaaaataatatttttatttaatattttataaaaatttatgacttttaaccaatttatttaaaatttaatatttttttttacaaataagagtttcaggaagcagacaatctcgggtgcccactgtgagaatgaataaccaaaagctttgggttttccttttaactagaactagctgtcttttataatcatcttcactgtcggttgttaatgaaaaaccactaaatatattcttatttaattgttttatttaaatactcaatttataataagtatatttatttacgtttgtaatattatctattattaaataagaataaataaatgttattatttaatatacagttatttatttaaaattttatataatatttaaaccaaaaattatttattaatgaattcatgtttaatttttaaatttttatttaatgaatttatttatggtattagcggtctttaacattaatattttattttatatttttagtaagttctgtaacttctttttagcccttttatgaaaatgtagctactgtcaaatataatataactctaaaaagaagaataagaagaatgtagagaagaagaaagtttagggagaatgacaattacgtgtattcatttcaagataaataacttatgcagaaaataatctttaagatagtgaagactaattttgcgaactagttactcaaaaagtcttttttgataatgattatgtaaagagatagattagattttcacacgaaagaatttattgaacatttatataccatttttttggagatcatgagtgaagaaaaatgttggtagaatatgcattttttatctcctttaatgtaccattcctttaattgagcgatacatgcaatattgtcttcatatataatcgtcgatgtcattttttctatagataagccacatgtttctcgcacatattgaattacatatctcaaccaaacacattcgcaacttacctcatgtaatgctaaaatttctgcatgattagatgatgttgcagttatgatttgcttcacatattaccatgaaatagttgtgtcaccgcgtgtatttcttgtaacaggctggactttttgacaagttctccatgttcaacattagaggaatgttattcacctattacttaagtggcaagctgctggctcttgacctccttgaatttaggctaaagacatgtagtttaatttccactcctctttctgctcattgtattgagtagagacattggttggcaggtaagttaaaaggcacaagtcatttcttattattgaatttcctagcttattgttgtgcgttttaatttgaagagtttcaagacttcaatcttgtgaccgattataagtagttgataatattgtagagagattgatatgactaaggtggagttgatattgtttgttttattcaggcgaatggtgtcttacttaatggtctttatggaacagtgacttattcctctgtgtaagtctccctcttcattgagttttaaccgcaatttcgtttgatttggatgacaaggttttagataagaaatagtttcgttcttaccatttcataacaggaagcaatttagttctcactcatagacacacatgtatacacaccctggactgttaagcatcaaagagaatcgataagtggagcatatcaaattttttaatctgcacaaatctggtatgttttattatttaatgttatatacctatgatacacaaatctggaatgcacaaatctggatagggttgttgttctgattgtttcccagaacacaaatgtacagcacaaaggtactgtgtgtttgctgtttgatcaccctaactctgaagtttcaaggatattaatggagaatgatacctcgaagcagaagatcacagaagtacaccaattgaagtggggtgtgtgctctgtgtaattgaaagagagagttaacaggtgtgtgtatgtgtacctttcttcatggaggacgtccttatttatagctttgagaatactgacctgagttagttgagtagtgagcctcatccattatctgtatatggagattgactgatagtgggtttagtggctatagtgttgtcatctccactaccttcggttatctgaataactgataagtggcagttataatatttgtcatatcttcttatcctttgatggttaagatattaagtatttgaattaataagataaatgagtctttacaaacaattcaaagaacagtttacaccttcaaagaacaaggaaagatatcacctgataatccaagaatgaatgaacaatgtgtggaaaataagaaacactcacaattaaccaagagggggggtgaattggttaagtatagatatttaaaattttcttgttcaaaatcagagttaaaaatgtcctttggatctttatcacaaaactaaatgaatatccttatccaagttcaatccaagacttgatatgcttatattttaaacacacagaaaacaaagttcaatcagaaacaattaaagaatgcagtaattaaaacaagaagcaagatttatactggttcacctcaaaccttagaggctacatccagtttcttctactcaacactagagtagagttctactattgcaaatgtatttcttacaagatattacaaacttctctttctcaaccctagagaaagtttagtgatctaaaaccctattagacccttagaagctacacccaaactgagaaacctactcagttgtacatggagaaaccctatctcccttgcaagaaaatcaacttacaatataaccaacaaaaacagagttactgcagaaaaatgaaatacccacaaagatttaggaaagaattcacctgatgatccaagatagaaatgcatatgaatgagaaacgtcaggttgaatgtaatctaaagatgcagaatcaattcctaagcctttgtgactgagtaagcttgcttcactaacaatcttagtgacccatcaatgaaacatttgaagcaagactcaagaacccagaataaacctttgtgaactcttagatgcctttagagaatgctcagaaatcgtaaaaatcaactcagtaatgatctctcttagttgttcattcaaaaaggcaaagggttctatttatagttgaaatcgtaacagagttaatcgattaaatgcgctccccacgctcctgtaatcgattaaaatcattaatgcagaatcagattttcaactaatggttaagataatcgattatttcgatgcataatcaattaaatcagtttgagcaaaaatactgatagtaacgtgtaatcgattacatccaattgtaatcgattaagtcagacaaatgctaaaatcaattttatgaagaataatcaattacatccagtggtaatcgactaatgcagtcctacacttaaatcatgtttgtgaagaataatcgattacatttaatggtaatcgattaaggcagagtgactaagtttatccaatgagcatgtaatcgattacaacactatggtaatcgattaaagcagtcacacgaccaaatttcaagtatgctgagttgtgtgtaatcgattaacccgataaggtaatcgattaaagtgtttatgcttggttttccagaaaccttaagaacaaaataattgattaagattagccagtaatcgattattgcttctttatgctgttttcttagctttctcttaattttctaattaactgcttaactcctctatgatgcaatacttaaatgatacatgaatgctataatgacttggatcatcatgatgctttcaatccttttacattaaatcacaaacaatcgtctttaatgcttgatccatgttgaaagccaaaactccaagacttgcaccttgattaaatcttcacttgatcttcattcagctccccctcaactcaacacaatgaatgatattcaagttgaatagcagattactaactcaatgcattcctttcctaaatctttgaatgaacaatgaagtttttcttcttgattcactaacccatgcgaatttgtaaagcttctaagtgtttagaatctcagaattatcactaataaaggctcagagcgtttttgactgcttacaattcgtaaatctcaaaatattcaaaagttacaaacctcagcctgagaggttctatttataatagctttttaactgaaaataatcgattaatcatgctccagtaagcgattgtttcgcatatttaatcaattaaaacaagatagtaatcgattaaaatgtttataaaatgtcccgagtttcaagaacgaaccatttaatcgattattctgatacgtaatcgattaagacagagacatatggttttccaagataaactatgtaatcgattgaggaaataatgtaatcgattaaaatgaccttgaagctttctgggttttgactaagaacactttaatcgattattccatgaagtaatcgattaagacagtcagcatgtctttttctaaaatgcatgtacaggcatgtaatcgattaaccatatattgtaatcgattaagacagagagttccatcttttcataaaaagcctgagtaatcgattaaaccgatatgtaatcgattacaatgatcatgttttgttttctaaagaacacgaagaacaaaataatcgatgctcctattcttgtaatcgattatttataagcaacttaatttttccaaaaactttacttcctaagtgcctttcttttatttaatcaattaattcaatgacctttaaatgaatgattgatgcatgatgtgcacacttggattatcagatcatatactcccttttacaatttatcaaattgattcttcaagctttcctttgagcatttcctttgtgcatgtttgaaagtccaaaatcttgaagcttgatcctcattccttgatacttggcttcactagaatcaacaaggctaagtgtgctccttgatcatagatgggggaagttgcagtggcaaacactcgcttggtgagcaaactcaatcctagtaccaaacctcatccgtgcccatacaagctccaatggctaagtgagaatggtgagttggttgttaatcaaaaggtgatgataagtttttgcattggtaagtacaaggatgatattttgtgtgatattgtgcctatggaggccaaccatattttgcttggaatgccttggcaatttgataagcatgctactcctgatggttttactaacaagttttctttttctcacgattctcgaaaaataacacttgtaccactttctcctaaagaggtgtgccaagatcaagtttctttgaaaataaaaaagaacaagaaaaaaagatttctaaagctaaaaatgaaaagcatgataaaaaccaaactcttgtgcttgagagaaggatagaaaacttatttgttagggagagtgatatcaagagggcatgtttgacaaaacaagaaatgtacatttgcgtgtataaggacttgtacttgaattttaactctaaccctattcctagtgttgttgattctctcttgttggaatttggagatgtgtttccaaagagtgtcccacccggtttacctcccttaagggggattgaacaccaaatggattttgtgtcgggggcctcttgtcccaatagatcagcctatcggtccaacccttaagagacataagaggtacaaaaacaagttgaggagttgctgcaaaacggttgggtaagagaaagtttgagtccttgtgctgtcccgataatccttgttcctaaaatggatgacacttggcaaatatgtactgattgtagagctgttaataatataactgttaaatttagacaccctattccccatttggatgattttcttgattaattgtatggtgcatgttattgttctaaagttgattttaaaaagcgggtaccatcaaattcatataagggaaggggataagtggaaaacaacttcaaaacaaagtatggtttgtaggaatggttgatgatgccttttggacttataaatgctcctagtacttttatgagattcctgaatcttgttttaagggagtttttaggaatgtttgtggttgtgtactttgatgacatattaatctatagcatgacattagaagaacatattgaacatcttagggctgttatgcatgtgcttagaaatgaaaagttgtacgctaatctagaaaatgtgtcttttgtattgatcatatagttttcctaggctatgtggtaagttccaaaggagtccaagtggatgaagaaaagataaaagctattagagagtggtctaccccaaaatttgtgagtgaagtgagaagtttccatggattggctagtttatataagcgatttgtgaaagactttagcaccctagctatgcctttgattgaagtggttaaaaagaatgtgacttttaagtggggggaggcccaagagaggagttttaatgacctaaaagaaaaattaactcatgcatccatacttgccttgccctattttttcaaatcttttgagcttgaatgtgatgcatcaaatatgggtgttgggtctattttgttacaagggggtcattctattgcatactttaacgaaaagttgcatggtgttattttgaattactccacttatgataaggaattgtatgcgctcataagggctctttatacttggcaacattaccttttgcccaaacagtttgtcatccataatgatcagaaatcactcaaatatttgaaggggcaaggtaagctcaataaaaggcatctaaatgggttgaatttcttgaataatttccttatgtcattaaatataagcaaggaataatgaatgttgtggccgatgctctatctaggagatatactttgcttgccatgcttgaaacaaagttgtttggttttgaacacattaaggagttgtatgtgcatgatgatgccaaaatatatgttgcgtgtgaaaagggggcgcatgatgggtattttaggcatgatgggtttcttttcaaagaaaaatatttgtgtgtgcttaaatgttctttacgtgaactccttttgagagaaacacatgaggggggactaatgggtcattttgggatacaaaagactttagatatgttgcataagcatttctattgggccgacatgtggcgcgatgtgcataagttgtgtgctagatgcatagtttgtaaaacgggtagatcaaaagttttgctgcatgatgatattgcgttgtcgagatgcatcaaaaacaatttaactaagctaattctgtagcacagagttaacctaggtcgactcagagacacgatcaatatggttctagcttcaaatcattggtaataataaggggggattttgtcgaacagttggcatgcacaaagtaaaacatgcaagaacacaaactaaaattaaagaacaatgcagaaattaacaagattatcaaagagtaaagtaaaacatattaaaaagcatcaatccaattcaccaacccaagctattcgaatcatcatcattctcataagttgattctatcatgaacattcattcaatctcaatagaagcagttcaatcgattatactcctaaattaattgaaaccacaaccctaattgaactatcattcaattaatcttgtgattatcattcaaaatttggacatgaatccataatcctaactcactttcaatcctaaatgtattcataatcatgaaaagacaatataaattgaagaagatgaatattcaagtagaattcgaaataccgaaccggaactccaattcttctcttgcttgagttagatccttggattgattaatgatttagccttccatgatgatcaccaaggaaagccccatgaagtaagtgagagaaatggaagaataacaaaatggaaatgaagaagatgaagaacaatgaagaacaaatgagagaaaatgaagaacaagcttttgattctaaaaactaaagaaaagaaatataaaacttgtttattgaattgtaaagtgctgtccaagtttcactaaagtcactaatatatacaatgacttagttctgaaaatagaatggatcataaataaacccaacaatctaattatttactatttacaccaacaaaattaaaactcacagccaaattacaagtgcagaggttccgatttcgaagcttaaaatgaccctccaaataacagaattggcctcgggctatttctagcaaattgtagatctttttgttatctttccagggactcctagaatgctgcattcagagattggtagaactctataggccctgtacacgtcagatacgttaagtaagcaaaaatccgaaaatacgttacaattagcaattaagctcacttacttgcctaagacaaaaactgaattagaataggaatataaaggtccaagagagatcaaataagctaaaaaggatagaaaaatatttaactaaaagcactccatcacatgacctatacattcctcttcctattcccaattccccttggaccgatttgtctatggatgttttgcttggttgcctcaaactaaaagaggaaatgattccatttttgtggttgtggatatgttttcaaagatggctcacttcatactttgtcataaggtaaatgatgccacctatgtggcagatttgttcttaaaaacatagtgaggctctaagggatgccccaaagtattgttttcgatagggactctaagttccttagccatttttggaggaccctttagaataaattgggtactaacctccttttctccaccacttggcaaccacaaacagatggacaaactgaagttgtaaaccaaaccctttcggccttgttgaggtcaattatcaataaaaatgttaaaacatgggaggaatgtttgcctcttgctgaatttgcttataatagggttgtccattctacaactagttgttctccctttgatattgtgtgtgggttcaatccccttacctttcttgatttgttgcccttacctaacatttcttctttgaatcatagggatggtaaggccaaagccgagtatgtgaggaagctccaggaaaaagtgaaagcacaaattgaaaaaaaaatggagcaatatgctaaacaagcaaacaaagggagaataagagttgtttatgaactcggagattgggtttggctccatatgagaaaagaaaggtttcctacccaaggtaatcaaaacttttcctagaggagatgaacccttccaaatgttggagagggtcaatgactaatgtaacgactcgcctcatcactatggtattactaactctattcgtgtaatttttgaattttaatgaaaactccattaatttgattacgaaaatggtggtaaattattcacgatattacacttgtcatactatatatatataaatacagaacatgtatatcttaaaccatcacatgttaggatataagttaattatatttacaagtgtttacgcctgaaatgtacatatccatcaaaaagaaatcaagagatcaactaagaaagagttgactataaaaacacaactcttttccaaaaggtaatccatcatcatcacgactgctcgacgactccaaccaaaagaatctccctccagagtcacgtaatgttgttcatctgcttacacgaacgaaggttcgcgattatcacaggtaccaaccacacggtacaacaaatgcaagggtgagtttattatataaaaccaacaaatataaaatagcaacaattgggaaggaaacaacattacccaccacagtcattaacaaaaatccatgattccgatacacactcaacaaaccaatcatccaatgcatttcacaactcaaacaatcatgcataaaatgatgcatgcacctgactcatctatcagcatgcaatgaggtaccatatcccgaaaatagcctctcacagggaaaatgtttcaccgcttatcagggccaccttgtcgtgcgttgtccattctcccccccggtgatcagccagcgttgctagggaattccaaacctgatgaccccttagtacttgcattttcagcccacagaaacccacaggtatgcgcgtgccttcattctatttccatccaatcacatgaagtatgaaacatgggcactatcaatgcatgaaccggctaggaacacatccttcctcgcaagggtaacctgtcatgcaccccccatgtacatacataacacaccaatgtgggctaaccgatgcactgaccgtggttaggaacacatccttcctcgcaagggtaaccaaccggtcactgcatcccaggtggacgtatataggatacaaccatgggcaccatcaatgcatgacctgggtaggaacacatccttcctcacaagggtaacccatcatgcacccctatggtatccatgtatatccacatcacacaatgacaaccatgggcaccatcagtgcatgatcatgaccagaaacaaatccttccccgcaaggatgaccaatcatgcaccccccatgggtatcagtgtacatacacatcacctcatctcgatattatcatcatatatatcaaattcatcttatttcaacattatcctcataaacatcaacttcatcgcatttcaacatcaacatccatttcatcatcatctcatttaaacatcataaaccacatcatcattatatcatttatacatcatcaaacacatcatcattatctcattcaatcatcaccaacacatcaataacatctcatttcaacattatcaatgacatcaatatcacctcattcatctacaatccatattaccacgagactggtattttagaaaaattctaaattaaaaaggaggactacaatacagaaaacacacttttatgcccatttaaaaatttaataaagaattaaataggaaaacatattataaaattttgggcatagtctcctctgtaattaagacttttccaaaaaatccaatcattacaacaacaacattagtcacaactttatccatcaataagcaaattcatcgcatcctattagttaaaaacacagtttttcttgaaaacgagcacacaacatgaaccaacatacatcaataataattatatcgcatcccattagtttaaaacataacttttcttgaaaactagcacataatagggacagacagatatcctcatagttggactccctgacccccaattatggtaccaaaactataaccaaataataaactccccttacctatctatatccctctattagctccttgaaatgttgttttgagatttctcaagtttgtgtgctttgggccaaacgcagagctcgatataccaaattgaagatgatttagtatagatttcaaaaagaaggctaacattaacattcgggtcaaataaccactcaaatttaaaaagaggctaaaatggtgttttaggagtccacattaaaagtcatcattttaaaattccgattacaccaatgtgatcgaggttcaacaaggatcacagaaatgacattagtttcataaaaagaagacttttactacatcttattttcaaaagggttttcaaaggaagtataaaactcccaacaatggtacccaaaacacaagagaaattaagagaagcttaactagctaggagaagacaaaggaaaccaagattacctcaaagaaaccaagaaaagaggattggaggctccattctctactgaatcctcgagttgagttttgaagattccactccgattaaagggttcctctccgtgcgatggtcaaatgacaagcgactgtggctagtggtggtcaccggtggctatggttggtggaggaggaagggaagggaggttgggtgcttgttttgggatgaaggaggccattttcgtgatcctggatgctgctatatgtatttaagactgacttgactcacccaggcgagcccaaaagcctaccaaaattcgcctgggcgagctggcccaattttaaaatttctggttcagtgaaaaattattatctcacgctacagatgttagttcgccaatcccaacggtcaaaagttaaatatattggttaggagtctacctttaaaatgttaaagcgatccaatggtcaacaaatccataatggtgatgttactaaaacatgtttttgggtcaaacttgaaattacacaattttagtgcagctcaacaactccatataacgtatcattcacaccaagaaattgcacaagggtaatttacacaacaattcaactaatctaaactaatcaaataatcacataacataagaaatacatcaaacatctacttttttagttatcaaaatttcagggtgttacacaatgcatacaaagtttacctccccggtgagtatggggtaagtgccacatttaatgttgctaacctaagtccttttgatgcaggtgatgaagatcaaaattcgaggaagaatcatgtgatgaggaccaagaaagcctagtgggccgaaagcccaacagtgcactacaaggattgggaggccccttgacaagggcaagagcaaatgaagcacaagaagcattggatcatgaagtgaaatacttcctttctcaagcattgggctaagatatcaaccttgccttgagccaaagaccaaccttgaagaagagcttagattcctccaattgattcaaataagtgaagagcccagatttctccaatattttgaacataatttgaggtcctgatgtccttttcaggtgttctttgatgcatttgaaagctctgaagatttctacaagtcgtatttctagtctcaagtcctaattctacatctatgatgatgaaaattggataggaagttcagcacaaagttatggatgaaaattacttattgtttagatttcttttagtgtaatcttgaattaggaatatgtggctgaagtcccacattggaaagaaagaggagagagacaccactttttggctataaatagccattcatttgtcttatgtagacacctttgaattaaataaaaactttgcactctaaagagttgtgtgagaggaagttctttttgggttcttgattggatcaaaccttggtgcttatcaaaggttttctataacctttgtggcgaatcctcacgagacttatcactctccctaggtgtggcgtctttttccatttcttatctttttcgcttttatttttttaacattttgttcttgtttaactcattattttggcgctgcactcttctttatattatttttatctttgtttcacttcatcaaacacttgacgtgcaccttcctatgacgctaagttcttattaagttacatgctttgcttgttttaactttctctttatgcaatacattctcttgcgctacattatacataaagcctgcaccttttctttttcaagagcatctttttttatagcaagaagccttttcgaggacaattcgtacaaaaaaaaatgaatcctcgtattggttcatattagtacatttattaaaatggatattatgtataaattataacacattgggatggctttttttactatatatatatatatgtaaatttattcaaataaaaattatatataaaatgtaacacaaaggaataaacatttttataaaagtaaaaatacatatatttacacttaaattcactcggatataatttttattatatatatgtaaaattattataatatcaattaaacataaaacataacacatgggaatgatttttttatgagagcaagttgatatattttatactttttaattgattttaaaatatgcataaatatgaatgttatccttgcgggcgcactgaaatgatcatgctactaaagttatagtaacatatgaaattagaatacatatattaaattgggacattaatttaatttctcttgattgtaactattacatatacttttaaatatattagctaatttaatatatttcatacttattagtttattttaaatatatataattcatgctgattagtttattttaaaataccatgacagcttagtatcaattagaaagtatacctattaggtcaacataataattatattttctaattaatactttagactttatcaatgaatttttatcttacggtcaatatctactcatctgagacataatttacttgcattctgttgctcgattcaaagtgtacggcaagtgcaccgatcgtttcaagtaataaaagtgggtaagtagagtatcgttctccacagggattgggtgaaattcacattaattataagtctaagcgattggaaagaaaacagaaaataaagaagaattgtttgaattgattggagtttgaataaaacagaatttaaataagtgcagtaaaataataagaatattaccaatggaagaaacaattgtggtcaggcacaatccctaatgttcactacctctttcacttaactgggttatcaagttgatcacaaatgataaatctctcctaaattcgtaaatcctaaataactagcgatttaaccctttaattcgatcgagaatcctaaacctttagcgattctgtcaaactaagcattaagagaatatatcataagaggttccgaattcttttgctcggaaaataaatctttcctactctagttaatccctaattccttagtgaattaaccttttaacctgcatcaaaaacccaattccttggtgaaatctatcaagttaagcatataaagactatattataaaattcctgtaacaccccggacgtctccggcaggttatcatcaatgatatacataacacgctatcagcgttaactaagcgcggtgcggaagcgatagaatcgtttatcttgattacattatgaatggaatatataaaaccacataacaaagcacataaacaagcccctgctgatccagataaaacatattcaacaatataggcagatgacctaaaacaaaacagagatatttaggaggaaacatacttatatacatccacatcatctgtacatatacatgctcaaaaacaagaccacagctgggtcatacatcagaatatgtacaggaaatgggtatacacatgccctacaactacacagagatctaagaccagcttcaactcttgaagctctgccctggtcttctactgcagcctcccatcctgcctatcagatccacaagggcctcctgccctgaagtcgctcctctcctcaagaagcacctgaaaaccacaaaccccacacagggtgagacaaacgtctcagtaaactcagggttctggagaatcctccctaaccctggttcaccaccaagcataaacaaaacatataaatagagttgaggaaatcttcctatctcacacatacaaagcttaggacatcatcctagctttcacacatcccagccatctgggtccaaaaccggatgctctcagcatcagaggtattcaacctcgtcatggctctcacagccattcatccgagatcaaagccatcatcatggcatcaatatctcatctaggctctcatagcctgtctcacatacatctcacagaggtacctatcatagtgtctctcactagacactttccataccagagaggcactgcctctaaccacccaaacattgcttaaggagatccctccactcaggactttgaactatacatacttgcctgaattcaccattcaggacttcacacactttgcctgaggagctcctcaactcaggacttcacaaacactggcctgggaatagccctccaggactttcacaatcacttgcctgggaaaagccgtccaggacttcataaacactgcctgggaatagccgtccaagactttcataacacatgcctgggcaagaacatccatacagggcaatcacctccaggacttttacacactggcctgggaaagaacctcctttacagggcaatcacctccaggactttcacaaagactggcctgaggataatcactcagggcttccaacatccttgcctaaggaggaacattctcatagttccctctattcttaggacttaagtggagagcagtggcaccttccaaggaatctcagctattccagggagtcctcaaactctacctctggctagggaacctcaactagcctgatactcatccagtatcctctaggttccatcacagaccatctcatgatctgcattctctcaaaaggcccatagcctcacacctgccatatcaggtgtctcataaccctcacactgtctcagtgtctatcctagggttcatcattacagcctagcacacactaggtcgtcacatattccatatatctagaacggtctgagattcactcaaagcaccattcatcagcctctcaggctcagaacatatgcacacatatatatactcacatatatatatatatatatatatatatatatatatatatatatatatatcatacatcacccattcgggtggcaaaccagaaataaggggaaaaccccagaacaatgagcttacctggctagccgtgcctcacaactctagcctccactgatggtctactcctctgacaccctctgtgtccagccctaccaaggcatacaaacatgtatcacagaccattcaagcatataatcatgcacaagctcatctagcagtcctcaactgcctctgggaaaggaaccacattccttcccatcaacctgagtcatctactctaaggttcatcaggcttatccatcacaagcctttccatagaccctcagtggtctatctcagatcatccatggcctcagagtcccttcagactcatccaccaaccatcaccagtgagcctctaagctctctcaacccaaactctcagggtttctcagggcttggacggtctctctcgccagacaccgtctccatggcctatcaggcaccttaagcctgtcacaaaggctctggcatgtctcaaatcaagtgactcagtctaagtcacacatgcctcacctagagccaaaaccaacagtcaccaaatcacaaattgaaagctaatccttcctcctcacatcattctaagcacttctctcaactggacccagagctaattctagctctatcacagatgggtcactattcacccaaaaccccaaaatccaaaatcaatcggagaaactcgagtttcttacctcagaactgatgaggaaggcctcagggttgctctccttagccttggtgcagctgaaccgccgcggtttttcgccaaactcgagctttcatccacctctctggaggttcctcaaaaatatggaggttttggtgaaagggaggaaggattctcgctctcacttggtttctaggaggattaaagggttcaggaagcgtttagggtaatcaagcaaggtcatgggagcttgggaagctctcccatggctgctggaagctctgaggaagaagaaaaccatttttctcctccaaaaacgcgaccccctttaaatatacacagcaccgaccttcccgcgctatcagcgcgggacaccgcgccatcagcgctggctgcaaattctatggcgccatcagcgccaccctggcgctcttagcgccaacctccagaacatgtggcgccacccgtgccagcttggaatcctggcgccccaggcgtgaactttcagagatcctggcgcccttggcgccaccatccagtgggtctggcgccaccagcgccagccctggcgccatcagcgccgcaccctccacagggttttcttctactgggtcccggcgccatcagcgcgggacctggcgccaaccgcgccgcagggagggtccttacaattccacagccacgcatccctatccctaggtgatgaacaactgttattttactaaggtcagaaattagaatcccaacgtccccattgcgaatcctaaccctcaatacctaaatagaatggccagttctaaataagaattaacaaataagcacagagtaaaataaaacaagaagaattctcattaaataccagtcaagttacagaggagattacattagtttatggccttcctacaatacaaagtttagcctgccataggccttaaatcaaccaaggctgtcaagtaaaacattattctgcaatgacctagccttgattcttgtcttccaatggtgtatagaagtgtagagaggtgtggaatggtgtctaatggatgatagggagtgtttttcttcagtccagaggccttttatttatagatagatttaattcaagtaataaagcctattttctgtgccaatttcaaatcatatcttgttaaataaggaaacaacgcatttatggcgctgattgcgcgggatcccgcgctaatctcgcgggttggacgaatcagaactgcttccaggccttgtggcacggatcgcgcggaatctggcgctgatcgcgcggaagattcgaatgaatggcgctagtggcgcggctcccacgctaactgcgtgaagtcttcgagctggaactctgattttggccattggcgcgatttgcgcgaagattggcgctaaccgcgcgggacttcagatttgcttttcttcatcttttgctttgattctcctcttttaagcccttaaatgcacaaatggtgataaaatgagattaaattaaatataataataaactaactaattttattctaattcctaacttatttatctaaattataatctaaaactagcctaaaactaagatgtgtttgcaacacatcaaacaattcccagatttaatagttgttgtcctcagcaacagatagaacttcaagataagagcaaggatcaataatcaaactgaaccacaatttacaatcctagaatcatcatgctgagtacaatcaattcatatcaaagcttctatggtactttgaaatctatcaattagtgaaagtaacttgagtgttcctcacaacattgtgtttattcacttattcactcaagtgtattaggttataattaccctctcactcaacaaagtgacagcattaccatagacttgaaaatattctcaacatatgcaagcataatttgatcaaaaggtcttttaggcttgtaacttggctgggctaagggtaggaaaaatctttggataagtagctaatatgaggctagatccagtcccttaagtccaatcctgtggtcttccatgttccttgttcattctcttcaatcttggtactttattcaacaatttattttcaataaaataaaacaaagcaataactttctttttgattttcttttctttttcttcaaaatacagccactttcagactttcagcacataatgtcaggtttattatttttcaactggcctgtgcttgtttattcttgttctttcataccttgatggacaattccctggttttctgctgtcatggactcagattacaccttctctagccttagggaaattggtcaatggatatgactttgatttgggtagtagaaatgaaaggctaaagttcaaaattaggtacaaatggaaaaataattgaaggtaagtcaatttggccctggttttcagaagaagaaattgccttaatcatatcaagtcacacctgcatccagagaaacaattcaagttctagaatactatgaaaatggagtctctcaaaaagaataatcactgtttggctcaaaatctcacaggtgttaatactcaagtcaattactgctgacttcatttcaagcaacatttcaacttcaacatgcatatcacataccaacaatcacaattccattcatgtatcatgcaattcatgttatgtttcatttcacacaagctttcatcaaagaattcctatccattactatgtccattcacttttaattctgaaaaatctaatgtgctgccaacttatttaaactaaaaactaaaacaaaaattttctgttggacatcctttgtttcttggatatgattcctcaaataatgcatatgcacccatcccagatttgagaaaattgctgtcctcagcaataagtgaaaaggattatgtgctgctaacaactcaattatgtatgcattatttgagaatcataaccagaatgacatcaatccaaacataatttatttcaaacaataaagtaacaaaacaactaacttaaaagtaatacagaaaattaaaaacagaagcaaaaattagatggttcctggtgatcctttttctgcagaatgcagcagcacttagcttgctgtctttctcaatcccttcaactgcaatgaaaaaaattccaaactatacctgatgcagtagctgaattaccagatttggtctttacattgtggttcagcttggacagaaataacaattcaggtaactatgcattagtagatgatattcaaaaataacaatgcagtttcattttgtcaatacacccagcatgtgtacaagtatctgggaaaatcaatatgctaagaatttcacttggtacccatgattcccagatttaggatcattcaccagttcagattcaagtaaattatgcatcagtgaataatgttccatgaatggaaggcacatttcagttcttaacaaggcaatcaaactgctcagaattctgcagcatgcccatgatttttcagatttaaaaccatgataactctaaaaaataatttaaacagtaccttaatatcagttatcagggttctcattgggcaatcagtgtactttgtgcccttcaaacggttttcaatcttggtttagaggaaccatataattactcagcaccaacaaaatagcaaacagcagtggataatttattatttacaataacaaacacagtccaactgtccattcggttcagtcaaaagcattaacaaacaagagatctggctcaacaattcgcagatttgatttatcaaatatgctaaaccagatataattcattttaggctgatgccaattcaattcatcagttgaccagtgcatgtcatgacataaaaataaacagcaccatctggattcccagatttagctcagtgaatgttcctaaatcatctaatcctagttagcatggacatatttcaacaaacagatataaatacatgtaatagtaattcatgtccatctttagtttaccacaatcaaagcattaacagtaattaacctgtggtttaatctcttgtccagatgactattggttcaaacaatttacaacttaagtatttaatttactcgccaatttaaaatttcagtctaaagcataaacaaggatcagaactaatttgattcacaccatgagattagccttaatgattcccagatttgggtcattatatgttcaaggctcagttccaatcctaattgaagagaccaattaattcaatccttacacagcagttgcctcattcatatcaatagaagcaagcttttaccattcagctttaaaataaaactgactttatgatctcgcgcgtttcgcgcggaagttggcgcaatccgcgccaatagacactggaagggcttttagctcgaacatctggcgcgactcgcgctgctggtcacgcgactagcgactcgcgctgctggtcacgcgactagcatgaattgcacgcattgtggcatggttagcgccgtacatggcgcgatcaacaccatattcaaaaattaagtgtctgaattcgaacacatggcgctagtcgctccatccttcacgctgatagcgtcatctactgcagatcaaagcttctggttcgaatttgtcacgtgactagcgcgagatgtcgcgcagttagcgtggagtggtcgtgaccttggcgcggttagcgccacacttttaacaggccatttctttttaaatttttgaatgctttttatgcttaatgcaataatcctaaatgcctaaaattttacatgcatgaattctactgctatcaaattaaaaacagaacttaaaacactatatatgtacatcaaaagattgctcgtttaacgtcttaagctagacgcatcctacagtttaatcattggtggatttaagtggaataggaattgtgttcccatccacttgatcatcaaggtgaggcttcagccggcatttattaactttgaaaggtttgtccttgtccaaagaagtgagttctattattccataagagcaaaccttttgcaccaagaaaggaccagaccaaaagaattatgacttacctggaaacttcaggcgatattttgatagcatcactctttgtcctggctcaatttctttgttgcgccatttctttatcttctttgctccaactttttgacacctttcttattaggtttttccaaagccttttctggaatctttttcagctttacctttggtgtttcatctggaatattatctttctttttctttttctccagcaattccagcacaggttccacaatttctgctgtgttatcttggtctgcaatgttcaatttctcagcaacttctgttgctgcaatttcagcttctactgaatcatttaatgctgttatttctgcatctattatacttgctgctggattttctgttgcagctgaaatttcctctactgcattattctttgctatcatacctgcacaacccacattatccagaaaatctagcctagaacaattatatttgtcagatggatttgtcacaggattaaaaacattaaacacaacagactcattatccatccttaattcaagttttccctgctctacatcaattaaggccccagcagttgctaaaaaggacctacctaacagcaaaggtatttcactttcaccttccatatctaatacaataaagtctgcagggaaaatgaacttgtctaccttaactaaaacatcctcaatcacccctgagggtgttctaatggacctatccgctaattgcaaggatactctagtaggttttaattcagttatgcctagggacttacacattgataatggcattaagtttatactagcccctaaatcacaaagtgccctccctatattgatatttcctatggctatagggatattaaaacttccagggtctttcaatttctttggaagctttcttagaatgatggcactgcacttttcagtgagtgctatggtttcacagtcttttaatttatgtttcttagacagaagttctttcatgaattttgcataattaggcatattggctaatgcctcagcaaatggaatattaatatgtaacttcttaaacatgtctaagaacctggcaaactactgctgctggatttgttgcttggtttgcaccgggtatgggggtttctcaaagctagagaaatcccattgcttctttggaggtgcagtatttttctccttcttctctttttctgcaggtttttcttcctctggttttgcagatttttctttttctgcttcagttgcagaatttttcttcaccttaggctcttctggtgaagtaaacaccttaccattcctggtggtgatagcattgacatgttcccttggatttgtcagtgtgtcactggggaactgtccttgtggcctttcagaaatttgctttgccaattgaccaatttgaatttcaagattccttatggaggcatcttgatttctgtggttttggatgaattctgttgttgtttttgacagctgcattactaccttctcaagttcagaaatattggtggtgggaataggaggaggctgcagataattattggacttgtagtctagtccctctccttgattgttcctctggtagttgtttcctgcagcaaaattgttgtttctctgatatggctgctgttgtcttggatcattccaaatgccattaacctgcacagggtcagctccaacaagaatagggcattgattagattcatgctcaccttggaagtattcgcaacagacatgtggcttgctggctgaaacttgggctgcagagacttgtaatctatcaattttttcattcaatttagccaactgttgggctaaaattttctgctctgcaagcatggcatcattgctgcacaattgtattggttctctctttggctgaatggtgatgctttcattttcagtacaagccagagatttaatcagctcataggtttgagctgcagtttttgaccttattgtgccccctgctgcagcattaacaatcatacgagtttcaggagtcataccgttaaagaaaatacgtacctgcttacccacaggcatgtcatattatggacatctcctgattaattcttggaatctattccatgcagcacacaaggattcttttccattttgagtaaaattggtgatctcattcaccaactggttatatttatccatggaaaagtattgggcaaaaaatcttgagactaagtcctcccaagttgagatgctatttgaagtttgtctatttaaccatctcaatgcatttcccttaacagcaaaagggaataggcttagtcttaccgcatcatctgagaccccttggtgtctgatagtgtcacaaattctcagaaatctgtctatgaaatcatgagggtcttcaaaatcttctccaccaaactgacttctttccaccaatacaatcaatgaaggatttatatcaaaatggttagcttgtattggtggccttacaatgctggagtttggtcttgtgaatataggagccagaatatcctccatcagttcatcctccggtcttcgccttggctgattattttgttcttcagccatctctacttcagactctaattctggaattgaatcaaagtcaatgtatttagcttctcttctcctttgtttggctagtctccttcagaatgttctttcaatttcaggatcgaactgtaaatcctcagggttaattgaacctcgcataaaactcagagaagcaattagtaacaaaaaattccaatcacaaagattaaaaattactgtaaaaatccgttaaccaatccccggcaacggcgccaaaaacttgttgctcgattcaaagtgtacggcaagtgcaccgatcgtttcaagtaataaaagtgggtaagtagagtatcgttctccacagggattgggtgaaattcacagtaattataagtctaagcgattggaaagaaaacagaaaataaagaagaattgtttgaattgattggagtttgaataaaacagaatttaaataagtgcagtaaaataataagaatattaccaatggaagaaacaattgtggtcaggcacaatccctaatgttaactacctctttcacttaattgggttatcaagttgatcacaaatgataaatctctcctaaattcgtaaatcctagataactagcgatttaaccctttaattcgatcgagaatcctaaacctttagggattctgtcaaactaagcattaagagaatatatcataagaggttccgaattcttttgctcggaaaataaatctttcctactctagttaatccctaattctttagtgaattaaccttttaacctgcatcaaaaacccaattccttggtgaaatctatcaagttaagcatataaagactatattataaaattccacagccacgcatccctatccctaggtgatgaacaactgttattttactaaggtcagaaattagaattctaacgtccccattgcaaatcctaaccctcaatacctaaatagaatgaccagttctaaataagaattaacaaataagcacagagtaaaataaaacaagaagaattctcattaaataccagtcaagttatagaggagattacattagttcatggccttcccacaatacaaagtttagcctgccataggcctcaaatcaaccaaggctgtcaagtaaaacattattctgcaatgatctagccttgattcttgtcttccaatggtgtatagaagtgtagagaggcgtggaatggtgtgtaatggatgatagggagtgtttttcttcagtccagaggccttttatttatagatagatttaattcaagtaacaaagcctattttctgtgccaatttcaaatcatatcttgttaaataaggaaacaacgcatttatggcactgatcgcacgagatcccgcgctaatcttgcggtttggacgaatcagaactgcttccaggccttgtggcgcggatcgcgcggaatctggcgctgatcgcgcggaagattcgaatgaatggcgctggtggcgcggctcccacgctaactgcgtgaagtcttcgagctggaactctgattttggccattggcgcgattcgcgcgaagattggcgctaaccgcgcaggacttcagatttgcttttcttcatcttttgctttgattctcctcttttaagcccttaaatgcacaaatggtgataaaatgagattaaattaaatataataataaactaactaattttattctaattcctaacttatttatctaaattataatctaaaactagcctaaaactaagatgtgtttgcaacacatcacattctaattgatcatggtatattttaaatatagttttatcatcatccatgtctgttttatcctatgcaattatctaaaccattattcacacacacacacacacacacatatatcctttgcaacatggatctcattcacaaaatctggtagcttgcatagctctgaatcagtgaaaatgtcctcatataacttcaatccttttactacattcaactattaatttcaattagctgtttaataagcaaaatcagttacttcttattgcataaactagtggtatagtagcatataacaaagtaaacgacattggtgatataattcaggtaacaaaacaaagatacattcctaataaataaaaataggaagaaacaaaaagatatagtaaatatcatccacatataaattacaagaaattccaataacatccatgtcaggaaaatctttctaaagaaaatcaataacattttgcacccttttggaaaccatgttcatttccatggcatcacatatgaagcagatgacaggtgtaggggttgcttacacattgaaagtgtcaaaaacggtgttgttggcaaacctaatggttgattcgatatcgaaggggaaagtggatgaatcttcagaggtttgggtggatgcctaggagttctaatccgcgagcaatgacattggcttcacctcctccttgctactttgcctcgagaaccaacaccgcattttctgcttgtgtgattggaagagagaacatgagggaaatggaatgggcaccactggaaaatcaagttttttcgacggatttaaatgctaattaacaacgattctgaaatagtctttgaagcgtgtgtcatcaaaagtgaatactttcaaagacaattgtcaaattgtttttgaaggtagaatttctaagacggttttgtgcaagaattgtcttagaaattgttatttttttaaaaaaaaatattttgtacccttcaaagacgattcgttggcaaaaccatatttaaagggtagactttctaagacgatttttcagagaacatcttagaatgtcattttttaaaaaaattaaaaaaattgagatttctaagacgggtttttcaaaaaatcgtctttcaatgtagactttctaagacggttagaaaatcgtcttagaattttttttaaaataaaaaactaagaaaattgaggattctaagacggttttgtgcaaaaactgtcttagaatgtggacttttaaagacgatttttcagataaccgtattagaatatttttttatatataaaacttaaaaaattgaggattctaagatagtttcttgaaaaaatcgtcttagaatgtagactttctaaaacgattttctagaaccattttagaatgtctttttttaaaaaaattaaaataatagaatatcatgttggatatagggggaacagaaagaagacaagtcaaggatgaagcttgtgtcttagaagaaaaattttagcttttgacatgcaagggatatgtaatttgttaagtgtatgagacactaatcttatgatccttgcattgcatgaacatgatcattaacatgcatacatgtttttactaaagctttaaagttgttcatgtttttcaaatgaaattaatttctcatggttaagttttggaaaattcattttacactgctttaatcgattacacatggatataatcgattaccagcttctgtttaaattcaggaaaagccatgaagaacactttaatcgattactagctaatagtaatcgattacataacacagaatgaaaatcataactatgtgtcttaattaattaccactctaatgtaatcaattacataagttcatttctaaatatgcatgacttccttaatcgattaccactcaattgtaatcgattatataggcttatttcaaaattgaacctgacttttttaattgattacaactcgtgttaatcgattacattgttcattgaacttttccaaattgagctaagaacactttaatcgattacttggaatattaatcgattacatatgataatttaatcgattacattggcgatttaatcagttacattcagttacaaaagttggctataaatagattgtgaatttttctgaaactaacatctcttgaattcgaaatttcaaagtattcataagccttctgaaagtgaggaaagtttatttgagttagatagttcttgtcccacacttttaaatcttcatggtgtattgaaagatttcttgtgcaagatttcaaagaagcctttggagagaaagttctgaaacttgttttttatttcaattctgattggtaaatcatattcattggatcatcaggttgtctctctccattaactcttgttgtagattcgtttttgaattcttggttatttgtaactattgcaaaggattcttgaagctttttctagatagggtttctctatagggaagagtagagaagggttctctatgtcttaatcattaggagtctaatagggtttgagatttctattatttatctaggttagataaagagtgattgttgtaaagcttgtaagaaataaaatttgtgaatagtggaactctattctagtgttgattagaagaactgcatgtaaattctcttgagaagtgaaccggtataaattcttgtgttgatctttattcttcaatctatacttgctatcttgatctgtgattcttgatgaaatcttcattattcaacaagttaagttttagcaattattttcttgggctgagtggtttgattgatttgaggcattcttgttttaattatgataaagatcctttaactttgattttttaaaaaatttaaaaagcccaagtttaaatcaattcaccgcccatcttggttattgtgtgtattcctattgttttcatttggcatcaagagcaggttcttgagtgttatttaagatcactatctttctttaaaaagaaaatgaataccacacaaattaccttcaaggagggtgccttcttcaatcgtccttcgatatttgaaggagagcatttcagtttttggaaaaatagaatgaaaattttcattcaatcaaatgacccaggtgcttggaatgcaatagaaaaaggtcctttgtttcatataaaaattgttcgtaatgatatgattcctaaagaatgggatgcaatgacaaatgctgaaaagagagttgttcagtatgatttcagagctaagaacatgattacttttgcactttcttctgatgaattttttagaactgttagtgcaaaagtgcaaaggagatgtgagagatgttggaagtaactcatgaaggtacatatgaagtaagaagatcaaggaagcaagccttgatccatgagtatgaaatgttcaagatgaacactgcagaaaacatatctcaggtccaaacaagattcactcacatagtaaaccatcttcttggtcttgggaagatttttgatgttgaagagttgaacatcaaaatcttaaagtgcctcacaagaccatggcaaccaaaggtgacaacaatcaaagaatcaaaagatctatccaagatgtctatggctgcactttttggtaagcttcttgagtatgaacttgaaatgtcacaactaacacatgcagaagatgcagacaagaaacaaaaaagcatagccttgaaagctgcatcctctaaggtggacaccgtagaagactcaagtgaagaagatggtgatgaaaacatgaatctaattgtcaaaaagttcagcaagttcatgagaagaaacaagaatagaaagttcacaaagttcaacaacaacaacaacaaaaagagtgacaacaacaacaacaacacaaattcacttgctttgaatgtggtaagcctggccacattaaatctaaatgttctatctttttgaaaaagcaattaagtgaaaagaagacaaagaaagaaggaaagcctaatagagcctatatagcatgggaagacaatgagtcaacaacttctgaatcatcaagtgagaatggagaagcaaatgtatgtttcaactccacaataagtgaagatgatgaattattaagtgttgaaacagaggtaaattttgaatttgatcaagttgttgatgttttctatgaaatgcatggagaggctcaaaagattgcaaaatccaataataggctcaaaggaaatcttagatgtcatgtcacaagacttgcagaaatgcaaactgaaatttgtaacttgaaagaagaaaatgaaaaacttgtttcaagctacaaaatgaatggatgtgtatctgtttcttcttcatcaaatgttgacaaatgcaaagctctgcaagaagagtttgatgagttcaaaaagagtcaaggtgaaaaacacatgttactactttcaaaaaataattacctagttgatcttttgaaaaggctttataaaggaaaatgcaatttagcttaaatgctaagtgtgcaaaaatatgctggagatacttctgggttgggttacaaacatagatcaaaatcttttggaaaaaccaagtttgtaccaccgaaacagaaaaatcaaaaagctgcttcaaaaacaaagtttaatcaaatgagtcattttgaaagagcatcaaaagctgtaacttataactattgcatgaagaaaggtcacatatctaataagtgctacgctaggagattctatgtgccaaatggagattgcatttgggtgccaaagaaaaagaaaatagctaacccctatggacccaacctcaattggccttcctttgtaaattgatttgaattttgcaggggtgtttaagagcaaaatcatcattatggtatcttgacaatggatgctctagacacatgacaggtgacatatcaatgctcacaaatttgactctaaaagatggaagatttgtcacttatggagacaataacaaaggaaagatagttggtgaaggaaatataggagacaactttaataccaagatcagaaatgttctctatgtggaaggtttaaagcacaatcttctaagtataagccaactatgtgataaaggattcaaagtttcattcaatgacaattgttgtatgatatgtgatgtcaaaccggtgaggtgattcatataggtaaaataaaaggtaatatctatttactatctatagatcatgcattcattcacaacactaatttcctaataagtaaagttgatgaatcttggctatggcatagaaaggcaagtcacattaacatgcatcatatgaacaagcttataagaaaagacttagtcattggcttatccaaactaaagtttgaaaaggacaaactatgtgatgcttgtcaaaaggggaaacaaacaaagaattcttttcaaagtaaaaacgttgtttctattttaagaccccttgaattacttcacatggatttgtttgttccttctagaactatgagtttgggaggtaatttttatgggcttgttattgtcgatgattactctagattcacatggactttatttttaagatccaagagtgatgctttcaatgctttcagaaaattggccaaacttgctcaaaatgaaaagggaagcaaaattatctcaataagaagtgatcatggtggggaattccaaaattagcattttgaaaaattctgtgaagaaaatagaatcaaccacaatttttcagctccaagaatacctcagcaaaatggtgttgtggagaggaaaaatagatcccttgaagaaggtgcaagaacttttcttaatgagacaaatttgcctaaacatttttgagccgatgttgtgagtacaatttgctacactttgaatagattactaataaggcctattttgaagaaaactccttatgaactatacaaaggtagaaaaccaaacatttctcacttaagagcatttggctgcaagtgttttgtattaaacaatggtaaagactcacttggcaaatttgatgtcaaagctgatgaagctatcttccttggatattcattacaaagtaaagcatatagagttttcaataaaagaactttatgcatggaagaatcaattcatgttatttgtgatgaatctaatctaaagaggaaaagaagtgtgaaaatgatgcaggtcctttagaagagtttatacaacttaatggatcaacggaaaaagaaaaggaagaacccattgctgaaatgaaacaatcaacaccaatccaagagttaaagaattggagaactacaagagatctctcccttgacaatataattggtgagtttactaagggagtaccttctagatcttcattaagaaatctctgttgtaatatggcttttgtctcacaaatagaacctaagagcattgatcaagccttgtttcataagcattggatgcatgctgcttgtttgttcttagaacaatggattttgaaacccattcttttgagagaaaagttactaagagcattttaatgtatgacccacaaatcctctgtttcaacaaacatcaagaaacctagtgaggatttcctttttggcacttgataaagagaaagttttatagagattgttttgagatttctattcaacctttggttcaagattttttaatcatctgcaaaaatatgcattggatcccatgttgtatctctccttgttactttgttgtatttctttaagaaattatgtgtttgtaacttgtgcaatagcttcttagagtttttctagagggaggttagagaagggttgtttctctaagtcttgatcacaaagggtctataggtgttagatgccttgttcttagtttgggattgattaagagtgattttataacttgtaagaacaaattgcatatagttagatcctagcttgttggttatgaaattgggtgtagcttctcttgaattgaaaagtgaaccagtataaattctgtgttgttttcatcatctctaatcttttctctggttattgattgtcattcattggttgaactctttcataatgaatagaagcaattttattgtaattgaatttcataaagattggaggttgattgatcaaagacattctaagtttgatttgtgatataatccattaaactctgattttaaagagattttttaaaggggcaagaagagccaattcaaccccctcatggtttgtgtgctactcatattgttttcataatgggcaacataaaagttcagcaaggttaagtagatggacgtccgcgtattatctcaaatatagataagttgttgtagtccaagagcttctagaagctaagtagatggatgtccacgttcctgtagcaaggctgacttggagggtggacaagttgtactcatcatgtttgggttggtacttaaggcggaaatatacatagttattgtagcagggcagacacgggagcatagacacatgtacaatgaccctatagtaatgtccacatgtaattttaccaatttgtacagtacataagttccccagcctctgagtcaatttataggcgaaagaggtcaagtaagcattgatgatgaatgtctagtgtcgaggataccaaatattcttgataaataagatgtatcttggggagcccccgaaggtggacaagtgatgtccaatgtcaatactgataactttgtaaaaagtaattttggagctatgtcaagctcgttaatgtagactgtattgatgaagtcaaatgtgtcaggccaataatctgccaaaatctgacagttggacgtgagccttgaaagcacgcatgatgctttgttatttccccaagtgcgtgaagcacattcgccgtactcgtgcatacgtgtccctcaaggaatgagtacgtactagagtagtgtggtagtgggtgagtgggcattgattgtggcatggattgcaagggggacgtttcaaatctgtgcgtaactgctcagttgtcatgcctcatttaagttgatgagacatttgccatttctctcaccgccgcttctccttcctctgaaaattgtcttcttcctctgtcccttctcgccttaaaacttcttttgttctaaacatccttctctaaaaattcttgaatcccctttgtctgattctactctaggtatgcgggtagtgattcaggagaatcagtggagcaacgcgttatgagcgatatgatctccatcggtgattccttggaagaggaaacccatcgtggagtgtctaaagatgagtcttcctcttctggaaagaggatgcaatctcattggactggtgatggcacttctcgccctcgttagaaggcaaggccatctgtcgcccctagcacaggcgagcttttgccacttactattctgccccctctttctgcttccggggggttaaggccaactggtgctcagagtgtgagggcctctcctcgcgtgtgtcgcagtcgtagtattgggtcaccaactgttgttccgactgtgcctggctttgagtgggtgagggaagatgttatgaagtacaagtcttctctcatatcacctacaagtgtcaacaacatgtgtcatcagcttccactgactgtgcctgaagattctcgcaagatcatagttgaggcttgcggggataatgagtttccattcataagggcagcgtcgggtgctccgcccttctttttttatttatcagtgtctttttgaagtcctaggacttctcctccccttctcccccttccagtgtgctttgctggactttctgaatgtggcaccctcccaactgaaatcaataatgaacacacaaaataaccaagaggggatgaattggtttaaactttccctttttcaaatttttagaaaatcagagtctttaaaatctctttaaaacaagtagaggatttaggatctttatcacaattaaccaagaatgcttcaatcaatcaaaccactcaatttaagaatacaattactaaaagcttcacttgttgagtaataaagatttcaccaaaagaatcatagattaagatatcaagaagagattaaagaatagaaatcaacacaataatttatactggttcacccctcaacaagagaagctacatccagtttcttccaacaaaatcttggttagagttccactaaatcaaaatctgttctttacaagcttacaaatgatcaccctttatcaaccctagataaagatctgaaatctaaaaccctattagacttctaatgaccaagaactagagaacacaactctgttcttccctctaaagaaccctactctagaaatgctttaaagaacctctttgatctaagaagttacaagaaacaaaagtaaataaacaaatcactgcaagagtttaagagagatacaaccacatgatcctcagaaggtgaatgaatgaattttaccaaacaatctcaggttgaatgaatgaaattcttgaacaatgctctatttgaaaaactcttgagaaatcttgttcaaaccaacatgatcaatgatgcatgagttctaggttttgaaacaggatcaatgtaactcagaatatcttttctcaggctgtgagagcttttgtaagtaatgggtatttcacaaaatcaagttctgttcaaaataaaagactcaacaactttttatagaaaatagttgtaattgaatgtaatggattaaatcaccaatgtaatcgattaaattaactcatataatcgattaatattccatataatcgattaaagtgttcttagctcaatctggaaaagttttacgaacaaagtaatcaattaaaatgcattgtaatcaattaaaccaatcaagctcagttttgaaacaagcctttgtaatcgattacggttgagtggtaatcgattaaggtagtcatgcatgttttgtgtttttttgttgtgtaatcgattacgatatgtttgtaatcgattaaagtgttcatcatggtttcgtaatagattacataagctggtaatcaattaaatcagtgcacaatgagattttccaaaatttaaccatgataaatttgtttctttatgcaaacatgaaaacctttatgcttttatcaaatcatatatgcatgctaatgattatgtttatgcaatgcaagggatcataagatgagtctcttaaacaacttaataaattacatatgccttcaattgaatggtatgtaaaaagataaaacttaaaagagcttcctgatcttgatccacttcaagctcccgttgtgtctaacaccaacttcaccccaatagttgggcagtggtgcgggcattgagattttatgttattttctaaacattcatccgagtgttcatctttttctattcttcttccaaaccaaactgtctgggaagattggttgggtctacttgcacagtgtttcaaagaaattgttcgaggtagacaccaatgtctttcgccgcttcatggatcgtttcttcaaagtccccgaaagtggtgtcatagcagatggtctaccgttgatgcgcaacagggatggggaaccttgcttccccttctattggcaggctgagcccactaggttcagatcctttgatgaggattcactgaccctagtggagaggtcggacaaagcaactttggagttattgttggcctccctagacgcgtgtgttattttgtcattgccctcggcaaatgaccctcctgctacactggacgatattctagctttcttatgccttctttgtgtgcttgtttattcatgtaccccgacttgatgcttgtgtttttgctttttgctttttacaggtatcatgggtaacttctcatggaggccattagtgaagagggtgagtggtggtaatgatgttgtgccaccatcccctgttcccgccagcgagagaagaaggtcgaccatctgttagggtcgaccctgtcgaagttgtcgttgctttccctggcccctccccctctgagttgtcaaagaggaaaagggatgagggtgtcgggatgtctggtcgcaagaattcctgagccatctatgcccctcgtaacctttgtgcgataaggaaggctgtcgggcttccacctaatgtaccagtctctctttctcctgttcgggcatcagcaccggtgctagcccccactgttgcttctcctactccaccaccacctactgctcctgcccctattctggtcacctctccaacctagactctgccttcttatgctcctgctctgactactgctgtccctgctgttgctattgtgcctcctgtggctgctgctttgactccacccgccacccgacctactcttactgttaccgctccttctccttttctgcctccttcatctgtaatcctgccacctactgctcgtcctgccacctccctcgagttcatgactgctccaagggaggttgactcttttgtggagtgttgggcacaggcttgagtgaagactgccaaccccttttgacaggaacctaaataggtcgaccggttctcaatgtgcacttgaagctgccaagcttttttttcaaaagggccttgctatcatagaagaacatggacaggtgcatcaagaggctatgagcaaagctgcttctatggagtaggagtataacaagctaaggggcgctattcgccatgcttggcgggcggagcgcaacaggctgaatggtgctgtggtggcccttgctaaagttgttaggtgcaaccatcagctttccatcaggattggtgaagctttgtccaagctgctgtgcaacaggcttgatggtgatgagctattggcttgcagcaaggcttatacttctaaggttgataaggaagtggctgagttggaggcgaaatgaaaatatgttgaagagggactcgctgctgagatggagctagctgagaaggtggcaagtttggaggaaaagctgaaggaaaccaaggtcgagcttactgctgaaatggcagtcaacaaggagcttgacgaggagtagaaggtattcaaacgagaagcagtggagcagcatgagaaaggctttctcaaagttgtccaccaagccggcctctttgcgaaggaccttgacttgggtatgtttgaccctttcaaggatgtaaaggatggtttcttggttgatgaagaggagctcggaggtgctgaggaggccacttgtgaggcagctgatgtgtaggttgcttttgttttgcaccttttgtttccgttttgcttttattttgggccataaagaccatgtaaataaatgttgacaattcaatgaaaatgttgttcttttttcttcaacccttctgtgtcttctcctttacatactgtcttctattttttgcttgcgttgatgaatataagccgcttgacttgtgtattttcatcgtaatagttgagacactatagttggtagcatcctgttttgtttgctgagtcttagaagcaaacgaaccatcaagaatgtaacttggatttgatgtgtcaactgtgattcatgcactgatattggacttttgcttccgccaatgactaagtgtatagtcttgcttgtctagattccaaatgaacatgtagacattggtgatgtgttgcaaacacatcttgtttttaatatagttttagattagaatttagttaaatgagtagttaaatagattagaattaattaaattttctattttattattttaaatctaagtcaataccatttatgcatttcagggtcaaaagaggagaatcaagggccaaataaagagaaaaccaagtctacagtcccgtgctatcagcgcggtagcccacgctatcagcgtgaagaagacgaatccaagactgaagaatcgaagaactcacgctattagcgtgagaacccgcgctagtagcgccgccctttcgaaagacccacgcaattggcgtgggatcgcgcgctgatcgcgtggtattgattttgtttccttaattaagaagattgacttcgaaattggcaaaagataaaggtctagttactctaattaaaccattctataaataaaggcctctggggactgcagaaagtatctcttaccaaccactatcatcttatatcatctatctcactctttctttctcatcttttcaccattggaagtcaagaatcaaggcaaggtcactcaagaatgtattatttgacagcttttggtttcttgaagcctatggcaggctagacttgtattgtggaaaagtcatgaactgatgtaactcctctgtaacttgatttggtattgagtttaatgctgttttgattattttattctattctatgctgattaatgttattcttatttggaattggccattctatttaagtattgagggttaggattcacaatgggaacgttggggttctaatttctgacttgtttagaataatagttgttcttcacctaggaatagggatgcgtggctacagattttataatataatctttgtatgcttaatttgatagatttcaccaaggaattgggttttcgattcaggttagagggttaattcactaaggaattagggattaactaacttaggaaagatttatttctgaataatcataacaagatcacatggggtttattctttgaatacttagtttgacagaatcactaagggtttagggttctcgatcgaattaaagggctaaatcgctggttgtgctctaggatttacgaatttaggaaagatttatcatgtgtgtgacttaagataataaaccaatcaagtgaaggaggtaggaacaaaggggattgcgcctgaccacaattgtttcttccattggtaacttcttttatatttttactgcattttctattttgattcaaacacaaatcaaaccaacaactctttattatttctgtttttacttccaatcatttagaattaatattattgtaaaaattacctcaatccctgtggagacgataactcacttacctactttattacttgtaacgatcggtgcacttgccgtaatcgttgcacaacaattggacgattgtttttggactcccgcttgtgctagtgtctgagtcgatatcactgcttttctaggttcaaagtgaatgaaaataccaagagtgttgtcttggatttgaaatgtcaacagtgtgccttgacaacttgttcctgcaaaacaagtaattctatgttccgatatgtcgggattcaatagacgtaagagtaccaagagagttttcttgggtttagtatgccaagggtagaccttggacttagtataacaagagtggatcttgggttttatgttcttgagaatgcacaatcctacaaggatgaaatgtaggaataatagcatatgtcgaggatagacacaattgtaccttttatttgtcaagtttgataccaatggagttgtccatgctgggttttgtcgagattcaccaaagtatgatattgaatctgtgaatctgtatgtcaccaagagctggtctcggattttgcaagtttggaggtcaaccaagacttggtcacgaaccttgatggtccaccaaagtttggaattatgaacctagagctggcgaggtcaaccaatgacttggctttaagaaccttgacagtctactagagtttggaattacgaacctagaactgcagaggtcaaccaactacttggctttacgaaccttgacagtctaccagagtctggaattacgagcctgtaaactaccaagagccgatcttgggttttgtaagatgccaaggaatgttcttaggctttgttgaaggtccccctagggtcctacctaatgccagccctagagtagaagacctgtaaggtaccaaggactggacctgggttttgttgaaggtccccctagggtgctaccaaaggctgatcctagagttgaagacttgtaaccgaccaaggagctgccttggattttgctggaggtccacctaagatgctaccaatggccggccttaggattttgcagacctttggagagtatcagttgaccaaagctctaggttcatagactgtagtttgggtttacaacctgttagggattgaccaaagctttaggttcatagaccgtagtttgggtttacaacctgttagggattgaccaaagctttagattcatagactgtagtttgggtttacaacctattggggtaccaagggtagaccttgggttttgctaaaggttcacatagggaagccctagggttttgcaaacatttggagagaccaagacgcgtccgtcctagatttagcaaggttcacctgggattggccttggtgagtagtacccggacatgatcctgggtctttgttgaggttggacctaggatagtgttcaggcgatagttcctgaaattgattacgtttctgcagggtgaacgtaagcaaatgtaaaagaaaagagaaatatgttttattaatgttgcaattaatgtacatattccctttgttattcctcggatgggcctcattaaaacctcttaaggaaaaacccaatggaataaaagacttgaataggaaaaatagtacaccatccagccttcaaattctcaactgtattagaacttcaagtgggtagcattccaagttctaggaatgtctttaccacttagttcctgtaatttgtaggcaccattgtctaggttggtgataattctgaacgggccctcccagttaggtccaagcttacctgcacgaggatcttttctggcttcaccccggacatgccagactaggtcgcctggctgaaaggtttgtggttgaaccttttagtgttatattttcgtgtcatttgacatttcatagcttcttcccttatttaggccatgtccctaacttcctctgcggtttctaactcaacccgcatgttctgttcattgtgctgttcctgaaacaacatccttcttgctgatgtttcccatagctcgacaggaatcataacgtcagtgccataagtgagccgaaagggagttttttgagtagttgattgtggtgagcaatgataagccttcaaaatgttggggagttcttctttccagaggcctttagacttgtcaagtctggtccgtaaggctcgaaggatgactcggttggcagcttctacttgaccattagtttgagatgttcgacagaggtaaccaagtgtttgatacccagtcgtgtgagaaaatattcatagttctgtgccttgaattgcgtaccattgtcagtaatgataacatagggtaaaccatacccgcatatgagatgtttccaagtaaaagtttcaatttcattggtagttatctctcgtaatggttttgcttcgatccacttggtgaagtagtcgatagctactagcaagaacttgaccatttctgaagctctagcaagtggtcctagaatgttcatcctccacattacaaatggccatggagaagtgatagtgtgaaggttgtcagggggaatccctgagacgtccgcaaactcctagcaccttttgcacttccgaatgaatttgaaggcattggccctaagtgttggccagtagtatcctgctcgaactactttggtggcaacgaagtgtcctcctgtatgaagaccgcaaatcccttcatgaagttctctcaggacttagatggcctgtttgttgtccaagcacttgagtagaggtgcagtcagccctattttgaacagttcgtcataaaggatgacgtagttgctggctttcctttttagtcgtcgggcctcattttcatctgttggcagtgtcccctaagtgaaaaagtttatgtaaggggtcatccagttgaattcctctgcatcggttgtcattaattcttgggtgtcaatggtgggattctaaagtgtttcctggatgaaggttttgaggtgcctggtcttcttagtactagccagcttggagagtaggtcaaccctagaattactctcttgtggtatatgatacatctcaaagcactcgaagctgtcgataagtatcttgattagatgatagtattggaggagtatagcttctttggtttgaaacttgtcagctacctgtccctggacgagttacgagttggagtagcatctcagatatctagctccaacttcttttgcgagtctaagtcctgccatcagtgcctcgtactcggcttggttgttggaggctttgaagttaaacttgagggcttgttccagggtgatgttgccaggaccctcaagaataattcctgctccaattccccacacattggacactccatccacatagaggttccaccagtcttgagtggacttgtcgtcctttgcaaattctactaagaagttcgccatgaactatgtcttcatggggccgtggggttcatattgtaggccgaaatctgacaattcgacgaccatgctaccatccttcctgccaaatctggttttcgtagtacctgtaaaagggcttcgccttctcggcgagtcttaggaggaatcgtgatagagccgttagtcttccattcagtctttgaacttcattgacatttgtcgggctatgtatctataagatggttgagcatttgtctgggttggcttcaattcctcgatgtgtgatcatgaaaccaaggaactttccacccgcaccccgaatgtgcactttttggggttaagatgcatgtcatgcttccgtacttcttcaaatacttcctccaaatctgccacatattgtgctacgctctgaggcttgacaaccatgtcgtcgacatagacctcaacattgtatccgatccattttctgaagacacagtccataagtcgctgatatgtgtcccctgcattcttgaggccaaaaggcatgactttgtagcaataggtggcatcttcagtaatgaatgtggtcttttcttcatctggagagtgcatcctgatctggttgtacccagagtatgcgtccataaaacttaggacatggaacccggactcaccatcaaccagtctgtctatgctggacaatgggtatgcgttctttggacatgccttgttaaggtcgatgaaatatgtgcacatgcgccacttgccactggcctttttaaccatgacaatgttggcaaaccaagtagagtacttgacttctctgatgaaattggctttaagaaatttgtctacttcttccttcattgccctttgtctttcttctcccatgtttcatttcttctgagttattggcctagcctgcggacatattgccagcttgtggcatatgataataggatcaattccaggcatatcggggttaccaagcaaataagtctgtgtttttgcaaagaatgtcagctatgtgcctgtgttcgtgaccagtaaggtccttgctaagctgtatatattgccctggtttaggtccaagttgaagtttgacaagttcttcaatcggcttaggtcctttgttgacattgtcatggcatgaatccacatcgaaggtatcatcaaggtgagttgtatagatagttagggtgtaggaggtggaccctttgtctatgctcattacttgactagtaccccccctgaagtgggactgtgtctgaccggctccctattggaaggatatagtgccagtttcaagctttttgcgtagcaatgtcgggcttggttttagtctgctttgacggtgacattttctcctgtcatggtgggaaacttcattttcaagtgaggtgtagagacaatggctccaagctcatttaaagtttttctagtgattaaagcgatataagcagtgtcggcctctactataaagtatctgatagtgaaacttctagatagtcttccttgaccgaaggtagtcatgagatctacataccccctgatgtctaccttttctcctgcgaagactagtaggggtccaagatgagattgaatcatgtttggagagatttccagttttgaaatgctctccaatacaagatgtcggtggatctgccttgatttatgaggaccttggatactttgaagttggcgattatgagggaaaccaccattgggtcatcctggttgacaggattaattcccacaaagtcagcatctgtgaaagtaataggaaggaggctccgtggtgagaggatatcgacacaattaatgtcaatgtcatgcaagtgtctctctcgagactagtttgatgaaccaccatatgagaatccacccgcgatagtgttaatttcacctcggatgtgctgggcatgttcgttctcctgctggcgaggaggttgacgctactgtctatgttgtcgtctctgcttccctctattgtcaggccttctatcaacatctcggttcctgtcatggttcctgtattgatcttcttttctacccccaggtcagtttccggcagggggactgtcaggtcttttcacaaaccgtgccaaatacactactacaataacaactttttatgatgcgtgttttaagacggttgtcgaaaaaccgtcatcatttgagtattggtggcatttttgcttttcaaagtcgattattacgaaaccgtcttcaaaatatattttcaaaaacggtttttgtctttgaaactagatagccaaagtcagttttataaaaaaaacccagaaaccgtctttgttgagtttgtgtttatttttcgtgcccgcactacagtgtcacttgttttcaaaaaattttgaaaaccccaaagtcccaaacgccttcccttcccctccttcctctcccccgtcgatcccaacaacctggtttagtttgcgctctctttgccttcttcgacacatagaatcgtgggttcttcggatcgtgcccgaactgtgggtgcaaggcctaagaccaaaccaaaggacggtgaaggcggtggggacaacgacaaccccaagtaggccaagctccgagtcgggctcaacttgaccatcataagggagaagcccaacgtgaagtggaacaacgtgggagggttgtctcctttgaatcaagttcttttgtcccttctttataataaaactatgatgtatttggtattcaaatagtccattcaagcttttgttgaggcttcaatgaactttgcttacaagaagaaatgggctctctatcttagctccaaaaataccattttaaagaaaatgatggaatcactttctctctccctcattaatcttattcttcatattatgtgattgcttcataaaataagtaatcgctgcttgtttgcgtaaatgtgaaattagctaaatcacaaatttggaaattaaattgcatgccacttgttgagtcatcttatattttacctttgaaactgatatattatatatttatattattaaattggttgtgtgaaaactgtctatacaacacggatctgaacagaattttggccaaggcaaacaaagcctatggattcgtatgaaggggaaacataagcctagtgccatgttttggaattcgcatttctgctgtgcaatacagggcaatcaatattgatccaattaacatgtcccttgcattcctagtattagtatcatgccatttggcagttcatcatttattctacatataaaggtgcttcacggtatgtacttatatcatatatatatataacactttctaatatttttttctttgtctatctttgttacttcatttatttcattacactttttttccttattcttcaaaaataaagactaataattttaaggtgaattgcttatatccatgcgttatgatgatcaattttttttttgttttgtacttgttttttctacgggaaattttctctttctaattctagttaataatttcaattgactccattttttactcactagtacttttgaactgaagctgcacatgaattttacccagacaaagattagaaaataaatacttctcaagcactaaagctggacattcattttttttgtttaatttgtaaattatttcttaacattaacctatttctctatatgcacttaatttgtttacttggaaaaaattgctctacttgatttgttcttctttctctgtttatatttaaccccttattcatttcaattataattttatttttcattttcctttttggcattttagtttgaaattctgataggatgaccccttcccttctcttcacacacacataaatctttgctacagaatgatctccattacaaaattgcttctttttactttatttttttttcaattgagaataactatatctaatataggtgtataatgggaattcagaaatttgatttgcattttggatttggtgataactccagaaaatgttgaattggacacaaggaacttatatttctttattgattgatttttttaaatatgtatctaatatgaatagggatcccatatgagtacaaagtagtggatctttcaaaaggagagcagtacaatctaggtgaattcagaggtctaagatatatgtagtagtttaggttccaaagtgaataatagtggtttgtgaagtttgtttgactgaaaaaccattgatttatgcttaaatttcagacttcgagagattgaatcctatgtactatgttccactggattctaagcttagagctctcaatcttcaggtaaaattcaagacgattgatttggatttgcaacatgaatgtgttgaatcaagatttattttaacttttaattctactggtttagtatcattagaggcaattcagtgggaaaaggccaattttgttgtgaattcttatagttaaatattatagaggtttccaaatatcttataagttcttcaggatgcaagatctactatgaggtactaacactatgaggtatcttataatatcttatatttatagttaattggcatactttctcgatttctaactattgtgtatatgtggtgtatgtttctttgttcaattttctgttttagtccctttgattcctataatcccttcagatattctatgagaagtgaactttatctgaacaacatgtatattatttgttgttcagccccttcagggattagtcaaatgatatttttggaaccttatgctgctaagagaaaactgaaatcagaaagtgacatgattgtggctcttagggatacaggctcatcatctcttgccctccattttcattttcttcacacttgttcttttggatacagattataatttcaatgcaagaatatcattgatgttttatcaagtaagttactttatgtcgttcattttgctctatatgagtgttaaatcatggcaagaggttctaatcagactataattcttaagaattatagtttctcagtcaagaccagcataacttgttattgttctggcgctctatctattagtcaattatcattcatcttgtgctgctcatatttatacataatgtctgctggttcatttctcttttcagtttgaaatacataaatgttgccatggtgactattctcaagaacatgactgttgaattcagggggagctgcttgaagcataagtaaagactgattcaagtctcaagttttgagacttcaaacatgcaaaggacaacttggagattaattaggataaaatgtaagagaaaagcaattctgatgatcctaaagcattgcattcattctaattcacaaataacataaaatggtttaataaaatcacaaggctttcataaaatcgttgtgtttcaaaattgtttcaaaggtttttggaaaaatggctttcttgctgctttaatcgattacaatatcataataatcgattattttgttcttcaattattctggaaaagctttcaagaacattataatcgattacttatcgaattaatcgattattttacctttggttcttttagaaattgccttgttgactgttttaatcgattacctataagtagtaatcgattacatgctttaatatgaattttaagaattgttggataatcgattactagtatactgtaatcgattacataggcttatttgaaaatagccactccctgctttaatcgattagcagaggttgtaatcgattacatagtataatcagaaaggctatgactcctgctttaatcgattacagtcttggaataatcgattacataagcaaaacaatcgattatttggtgcgtcttaatcgattatttctgttacgttttttttgttataaataggagctcactatgcttgagtttagaacaaagaatactgatacccattgagccaaaacaattctaagagcctttctaagtgttttcaaagtgtttttacatgcttgctctgctacattgatcatgagtttgtgagtcaatcttgggcaagatttcattcaagattaagggaagttgattcaatttgttcattcaacctgtgtttaatccatcatatgcattgtcaatcattggatcatcaggttttttctctccttaatctttctattattttcgttttgattttggatgtaattctttgtctattgtgattgggtttcttgcatgtaaagtagagataggatttctctaggggttgtgctgaggagtgttctccgaggggttgtgctgaggagtgttctccgtggggttgtctctaagaatctaatagcgttttagatttctaaactttatctagggttgataaagagagactttgtaattacttgtaagaacagaaaattgcaatagtggaactccattctagtgttgagtggaagaaaactggatgtagcttcatagtgtttgaagtgaaccagtataaatctttgtgccttgattttaatttctttcttgattatattttgttcatcttgattgtcttgttttgcttatcaattcaattttgagttgttggataccttggattgaacatttgattgaataaggattcttgatttcaaaagtgataaagatcctaagggaaaaactcttattttgtttaagaaaatttttaatttaccaagcctaaccaattcacccccctcttggttaagtgtgaagtgtttctatattttaacaattggcatcaagagctaggttttgaaagttactcaagatcactttctttcaaaaaatgaatacttcacaaataaccttcaaggaaggtgcctccttaaacatacctcttttgtttgaaggggagcatttcagtttttggaaaaatagaatgaagatctttattcaatccaatgatccaggtgcttggaatgcaattgaaaaaggtcctagggtaccaatcaaagttgttgataataacatgatttctaaagattgggatgagatgaatgatgaagaaaagaggattgctcagtatgattttaaagctaagaatatgataactactgctctttcttctgatgaattcttcagaatagttagatgtaccagtgccaaggagatgtgggagatgctagagatcacccattaagggactgaagaagtgaggagatcaagaaagcactccttgatacatgaatatgagatgttcaaaatgaaccaaaatgaaagcatctctcaactccaaacaaggttcacacacatagtgaatcatcttttgggacttgggaagacctttgatgttgaggaattgaacatcaaaatcatgaaatgtctcactagagcatggcaaccaaaagtgacagctatcaaagaatcaaaagatcttcacaaatgaccatggctgctctctttggtaagttgcttgagtatgaattagaattgtctcaactaacctttggtgaagatgcagatagaaaaggcaaaggaattgcactaaaggctgcagcacctaaggtggaaaaagaagaaaactcaagtgatgaggaagatgaagaaagcatgagcttgattgtgaaaaagttcaacaagtttctaaagaagaataacggcaaaagattcacaagaaataacaagagcaataccaacaacaacactagcaacaccaagaagattgacaacaacttcacatgctttgaatgtggcaaacctggccacataaagtcagaatgttcaatctacttgaagaaacaacaaagtgacagcaaaggcaagagagatgcaaagccaagaagagcctatattgcttgggaggacaatgattctacaacttctgaatcctcgactgaattagaagccaacatgtgccttacttcaattgttaatgaagaaaatgatgatctcttagatgaagaagatgaggtaacctttgaacttgatcaagctatttttgcttttcaagagatgcataaagaggctaaaaagtttgctaaatccaacaataagcttaagaaaaacattgagaatcatcttgcaaaaataatggaattacaaactgaagtttgtaacttgaaggaagaaaatgagaaactcacttcaagttacaaatcaagtggttgtgtttgtgccccttcctctataacttaatcaagaagaaaagtatatgcagatggtttcaaagaacaatgagttgattaatatcttggaaaaactcaacaaaggaaaatgtgatttgaatgagatgttgagtgctcaaaaacagtttggtggggtacaaaaagagttttaaaaaggttcaaaaaacaacatttgtgcctccaaaatagaagaagaagaagaagaagaagaagaagaaaccaagattcaatcaaaataggttctttagaaactcatataaagctgttgtttgtcattattgtatggagagaggacatgcatcttatcaatgttttgcaagaagattctatgtcccaaatggtgagtgtatttgggtagaaaagaaaaagcaagcaactaacccctttggacccaaccttaagtgggtaccttctcctatgaagtgatttgttctttttgtaggtgtgtcttagagcaagctcttccttatggtatcttgatagtggctgctcaagacatatgaccgatgacaagtccttgttcaaaaatcttatactcaaagatgggggctatgttacctatggagataacaacaaatggaaaattataggtgaaggaaatattggtgacagcttgaacacaaaaataagcaatgtactctatgttgaaggcttgaagcataatctactaagtataagccaattatgtgataaaggctataaaatttctttcaatcaagattgttgcatgatatgtgatggtaagagtggagaagtaatccacattggcaaaagaaaaggtaacatttatttgctttccatagaccatgcattattccacaagactacatgcttaacgagtaagttagatgaaacatgactgtagcataggagagctagccacattaacatgcagcatatgaataaactcattaaaaaggacttagtaattggcctacaaaaactcaaatttgaaaaggacaaactatgtgatgcatgtcaaatgggcaaacaaaccaaaatctcttttcaaaggaaaaacattgtttccacctcaagaccacttgaattactacacattgatttgtttggaccttctagaaccatgagtttaggtggtaattactatggacttgttattgttgatgactactctagatttacttggactttgtttttgaaatccaagagtgatgctttccatgctttcataaaattggccaaacttgttcaaaatgagaaatgttgtaaaattatctcaattagaagtgaccatggtggagaattccaaaatgaacattttgaaaaattctgtgaagaaaatggaattaaccacaacttttcagctccaagaacacctcaacaaaatggtattgtggagaggaaaaacaggtgacttaaagaaggtgcaagaacacttctaaatgagacaaatttaccaaagtatttttgggctgatgcagtaagcactgtttgttacactttaaatagactactcataagacccatcttgaagaaaacaccttatgagttatacaaaggaagaaagcccaatatttctcatttaagaacttttggctgcaagtgttttgttttaaataatggaaaagaatcactaagaaagtttgatgcaaaggctgatgaagccaatttcttggatattcattgcaaagtaaagcatatagagttttcaacaaaagaaccatgtgcatggaagaatctatccatgtattttgtgatgaatctaacccctcaaaagaggaaaatgagtgatgaagatgcaagtcaattggagcaaaatgtcagcttgagaaattatctatcaacgagaaaagtgaacctagtgctgaagcaatttcatcaacttctaaccaaaggccaaaagagtggagaactacaagagacctctcactagacaatattattggtgaagtgtcaaagggagtctctactagatcttctcttagaaatttatgttgtgacatggcttttgtatctcaaattgaaccaaaagatattaaccatgccttgcaagatgaacattggatgcatgccatgcatgatgaactgaatcaattcaaaagaaatgaagtttgagaacttgttcctagaccttcatcaattaagcctatcggtacaaagtgggtttttaggaacaaacttgatgaaagtggaatcatagtaagaaacaaggctagattggttgctcaaggttacaaccaagaggaaggcattgactatgaggaaacttatgctccagttgcaagattggaaacaattaggctattacttgcatatgcatgcttaatggattttaaactttatcaaatggatgtcaaaagtgaatttttaaatggttacattgaggaggacatttatgttgaacaacctccaggtttttctgattttaaacatccttatcatgtttttaaacttaaaaaggccctctatggtctgaaacaagctctaagatcatggtatgaaagattaagtaagttcttacttgatcaatcttttgtaaggtgcaatgttgataaaaccttgttcatcaagaggcataagggtgatatcctattggttcaaatatatgttgatgacattatttttggttcaactaatcaaatgctttgtaaagaattttctgcagctatgcaaaatgagtttgagatgtctatgatgggagttaacattctttctaggacttcaaattaacaaatgaagaatgggactttcctcaatcaatcaaagtattgccttgaagtcatcaagaagtttgaaatggagaaaagcaaagatgctgcaactccaatggcaacttcaacataccttgattcagatgaaaaagggaagaaggtggatgaatcctaatatagaggaattggttccttactttatttgatagctagaagaccggatatcgtgctaagtgtttgcttgtgtgcaagataccaagcaaatccaaaagagtctcaccttacagtagtcaaaaggatcatcaaatacctcaaggcaacacccaaagttgggctatggtatcttaaaggtgcaccaataaatattattggatattctgattctgattttacaggatgtaaacttgatagaaaaagcacaagtggaacttgtcatctccttggaagctcactcatatcatggtactgcaagaaacaagcttgtgtggctttgtcaactgcaaaagctgaatatatctcagctgggagttgttgtgcacaaagcctttggcttaagcaacaattgcaagattatttggagttgatcttaaggagataccactactttgtgacaacacaagtgcaataaatatttcaaagaatcctgtcatgcactcaaggaccaagcacattgaaattagacatcacttcataagagatcatgtgtagaaaggtaacatcaaggttgagttcattgatacccataatcaacttgctgacatattcactaaacctttgccaaaggatagatgttatgcacttagaaacatgctaggcattcttgatgaaaataatctatgctaacttgtttaatgtatgcttttccatgactaattgaagcctcactactgcatttatcattgaatgattgaaattcgaattgatctgttaaaatgctctgtttctgatacatttgctgtgataatcgattacaccacgggttaatcgattaaaatcatcaaaaatcacattatgtgtgcaagttatgcctctgtaatcgattacattgagcttgtaatcgattattcttcatgtctctgaaattaactccctctggaataatcgattacacatcgggataatcgattattatacataaaattcattttccaatttgattgtcccactggaataatcgattaccaccttaaagtaatcaattacacatgagcttagaatttttgatcttcctggaataatcgattaccactcaggataatcaattaaataagctctgatacttgtttgatttctatcttgactgatataatcgattactgaagcatgtaatcgattacacatcatcttcaacctctgaaagcttacaaaataatcgattataaaacgaaataatcgattactgtgtgttaaatttatttttagattgtctgaaataatcaattatgttaaattttaatcgattatttaagctgttatttgaattctaacagtttttctgggtttggtaactgcccaatccaatcaatttcgtatctgatcatcattaactggtgttaactgtctttaacagttagatttttgaataatttgaacgttggtgagtgatttttgtctataaatagtggctttgcatcaatatttgtctctgcaccaacatctatcttctcttaatttttttctgtcttacccgattgtgtctgtaatctcttgtttgtctccttgctttttcctaatcatgtctacaccaaaacgtgttaggactggtaaacgtaaggtaggggagtcttcatccaacccacagcctcaacccccaaataggttggacatttggttcagcaaagagtctgacaaaatgaactatctccagttcaatgccaccaagcccattagttcccctaaatgccttagccttgactggttcataaaggaaggattcacgtttcctgcatacttggaaacccaaggccttagaaggtttgttgaaatgaagggtacttactaccttgacttggtaaaggttttctatacctgtgccaaggcatccatgagtgggaaccttaagtccactatcaagtgagttgagatggaaatcactcctgaattatgggagaccattgttggtataatgtgtgagggggagagaaaatttgaagagactcctaatggctataataaaataggaatctatagggaaatgcttactgatccaaatatgcctattaggaatagattgagtactggtccaatggcaccagaaaacaggttaattcattatctcatcacctatatcttgactccgagggcaacaaatcatgcccaagctactgatgaagacctacaattgatgtatggtctgacaaactccattcccatgaattgggttattatctttcaagagataatgttaaaatccgaaaggcttgtcaactacccctttccatatgccattcttatttccagattcattgatcatttccagattgatgtttcaaatgaggtagtggacaacaccaactcctcaaacagccttatccaagagaaacatttgtcaaagcttggatcaatgaagacacctgatggatgggtgatggctgggcaacaatagcaagtgtctccacaaatagcacaacctgatcctgctgttgctgctgatagtgaagaacaagtggctgattctaaagaagaggaagccaattctcaacagcctctctatactcaatttgagtctctaatgctagcaaagatggaagggctactcagtatgcatcatgaatttagggctaagactcaaggctcatttagggaaatcaatgataggctagataatatataagccactcttaggatggatgattctgaagatctttaagtcttaagttttatttagtttatgtactcggctttttttatgttttttaaagttctattatgcaatcatctctccaatattaatgaaatactatgtttttagtcacttgtatccattgtgccttgcctttttttgtctttaacaagccaaatagggggagaaaaattgattctagcaatgctctgcacatacctctgtttgcccctgtttttgtgcacattttttggctaaaaattggtctgaatggtttgtgaaatttagggggagataactgttaaaaatgattgcattaagtcattatatcatgtgaatgaatactaagttaatctcagatgcttttaacacttgttcttgcaaaggtattgaatttttcaggtttaaaaaagcttaaataaagtgctatggtggttcctcaaattaatctcaagacccactgctaatcaattaaagatttggcatgtttaaagccaaaacgggggagattgttgaattcaggtggagctgcttgaagcataagtaaataatgattcaagtctcaatttttgagctttcaaacatgcaaaggacaacttggagattaattaggataaaatgtaagagaaaagaaattctgatgatcctcaagcattgcattcattctaattcacaaataacttaaaatggtttaacaaaatcacaaggctttcataaaatagttgagtttcaaaattgtttcaaaggtttttggaaaaatggctttcttgctgctttaatcgattacaatatcatattaatcgattattttgttcttcaattattctggaaaagctttcaagaacattataatcgattacttatcgaattaatcgattattttacctttggttcttttagaaattgccttgttgactgttttaatcgattacctataagtagtaattgattacatgctttaatatgaattttaagaattgttgggataatcgattaccagtatactataatcgattacataggcttatttgaaaatagtcactccctgctttaatcgattacacagtataatcagaaaggctatgactcctgcttttttcagtaatcgattacttagtggtgtattttgaaaaacatggatcttctgttttaatcgattataagacaggataatcgattatttgctttgttataaaattctagaaaggcttatgaacattttaatcgattacagtcttggaataatcgattacataagcaaaataatcgattatttggcgcgtcttaatcgattatttctgttacgttttttttgttataaataggagctcactatgcttgagtttagaacaaagaatactgatacccattgagtcaaaacaattctaagagccttttgaagtgttttaaaagtgtttttacatgcttgctctactacaacattgatcgtgagtttgtgagtcaatcttgagcaagatttcattcaagattaagggaagttgattcaatttgttcattcaacctgtgtttaatccatcatatgcattgtcaatcattggatcatcaggtttttctctccttaatctttctattattttcgtttttattttggatgtaattctttgtctattgtgattgggtttcttgcatgtaaagtagagataggatttctctaggggttgtcctgaggagtgttctcagtggggttgtctctaagaatctaatagcgttttagatttctgaactttatctaggattgataaagagagactttgtaatttacttgtaagaacagaaaattgcaatagtggaactccattctggtgttgagtggaagaaaactggatgtagcttcatagtgtttgaagtgaaccagtataaatctttgtgccttgattttaatttctttcttgattatattttgttcatcttgattgtcttgtttttcttatcaattcaattttgagctgttggataccttggactgaacatttgattgaataaggattcttgatttcaaaagtgataaagatcctaagggaaaaactctgattttgtttaagaaaatttttaatttaccaagcctaaccaattcacccctgtgataacccttaggcatggcgcgattgacgttagaccccgcgcgatcaacaaggggattcatagcagagattaagcagaacagaagggactgcgccaacaagcctatgtactatcgagggtacataggctaattctgcatgccatgcctggagcgtgggaagtgctccagaaagttgtttttcactggaggtccacgcttggggcgtgggaacccacgcttggggcgtgggaacccacgcttggggcgtgggaggtccacgcttggagcttggaagccacgcctggggcgtggaaagcagcccagaaacgccattttgtctgccaacccatgctggaggcgtgggagtccacgctgggggcgtgggagtcacgtctgggcctataaaaggcccagaagctcaaaaaatctggaattttctctcctctcttcttcctcctccgtccagacctccattagaggtgattccaagcttccataggccttaatacttcaccaaatcacttcctaaagccttgaatcatgagggaaactatgagtgagctgaaatccttcatccaaaccccttgagattgtgagttgggaggttccttctcagaggagaagagaactcgagataggcaaggaatagcagctggttttggacaccagagctagagggagtaatccagagatcttccttgctgtttctgaggtaagaatctcgagttttaccggttaatctttgagtagaggagtatatgtgaatagtgacccacatgagcaggggctagaatgagcccagggtcctgtagagaaacttgtttagaactgtataaggatgaaggaatagctttcagaattagatttggtgaactttgataataggctctgttgatgactgagtgacttgtgttaagtcaccagctaatggttacttaatgagtaagagccttgttgtaggctaggaggtgattaagaagctgggtggacggtgactgatggatgatatcaaccgtctgagttataactgtataatagtatctgagttattatattgtttaagctagcctatgtgatagttatgagtctaagaatgactctaaggctgatatgagcttgtgttcagtgtatgagaattatggtgagtctagatagactcagatgctctgagagggagagctgaggatagttagagttgttcagttatagctatttgagtctgtaatgactctagagctctatgtcttttgtgttagaccttgtatggtctgtggaagcctagattgtactagactagaatgatgaacctcaggttagaggatttgtgtgtttgatatcactgaatgcctgttacattgtatgtgatgtgtgtattgatacctgatttagggctggacaccaagggtgtcattggttggagccatagatcaggaagaggacggcagagtgtgccttagacaggtaagttcagtgtccttgggtatgattcccatcttgtgcaccacaccacactcctggggagttgtggtcatttcataatatatgcattagcatctgcattctggtattgatatatgcatggctctgagatggttatattctgagatactgatacaggagatggattcctcctgcgttgtgatatgctgagctattattgtactgtgattgtgattgtgattgtgagagatctattgaccaatagatagatgtggacctccctaggagacggttccctcctagtatggctggctcttgggtgatgatgatcccggggtaataataatcccctaggccaagggaatagttcagacggtttcctgctattctcggaggtaccatatatgtgcatccatgctaagggtagcacccaatgggatgacacaggtgtgagttccggcctcacactgggagacggtttcctccccttataagagatggtttcctcctattctgtgattttatttagggcgacggtttccgcccatgctaggagatggtttccttctagcctggcgttgatgatgatacgccattgattgatatattggtatatttgttatattgtggggtcatttgattgtgatatttatgtgtatattatgacagtgggccagaggggaggaaattcctctatggaccctgagcttactaagatatatatctcatcccttgtgggattccatgtttttcaggtgacccttccaagagaagaggacattactagggcagggggcccagtgcagaccatagggtctggatagagatagcatgaagaaagcttaatagctcattttggtttagtggatagctaataccttgtagattatggtagagactcccgactatcctatgttgtgatacttgggatgtaccctctagtgtgagggaagttattttgtagagccatggatgtggttcagactctatggatgtacatgatttgtatatagtatatgtatattcctcctcctgtatatattgtgattaatattacctgcctatgtgttatgacttgagatatgatactggaccagcaggggcatgtgctataaatgagatattgcatgtgtatgtgcttttgctatgttttgaacgtggttttacatgataacccatacacaatgaatcaagataaccgattcaaccgcttccgtcttattttaaactgtaaattatgcgtaattatgatattattaatgataacacatcagaggcctacggggtgttacatttaatggtatcagagcggtttcttgatttacacattatgtatgggacttgtttgtgctttggaatctgctgttttagtctgtcatgagcattgcatgtgagtacattaattgtgggcctgatcaactcactgtttgatgtacctgtgtagtgctatggagagatctggaaacaacagcaggattatcactgacccctctgatccagttgtagctgcagtggcagctttgcagcaggagatagctacaaataggcaggtacaggaggaactgcagcgtgagatggctgtaactagagtagtacaagaggccttagtgaaggctacttatcagttgatagaggaaatgaagagtctgaggaggaatgagggagcatcctccacatcccctgattatggaggtgagagtagaagtcctctaggaaaggaccagatgattcatgtagatgagacagatactgaggatatgcagtctacttccttagtgagattgttgacaaagagacctaggcatgttgatcctagtataaagggtaaaggtaaaaggttgagagattctactccaccagttagaattaagaatgagacagaccagagtcgtccagtacgagcaaaggtgaggaagaggccaattcctaagtgtccagcttgtgagaagaatcatttaggacagtgttccactggacagattatatgttacagatgtggtaagtttggccacgtgtggagagagtgtccacagttagaaggtcaggcacaggctgcttcagcagagagggttgaacccacagtaggtagagggtacccggtggatgctgaagaagcagctataaccccattacagatcagaggtatgatttgattattagttgttatataagatgtgatgtgttgtaaacacatcttagttttaggatagtttcaggttataatttaagttaaataagtagttatatgtattagaattaattaagttttctattttattattttaaatctaattcaataccatttatgcatttcagggccaaaaagagggacttaagagcaaataaagcaagttctggagtgtcacgcatgtcgcgcgagtatcacgcgtgtcgcgccattactcacgcgagtcgcgtggaagacccgagaagaccacgtatgaagcgtcgagtccacgcgtgtcgcgtcataactatgaggattaatgaattcttctctgtcaactcgcgcggctagcgtcacaattcacgtatgtcgcgtcataacttcacagtaaagcctgtttctcttctgccaatccatgcggaaagcgccataggtcacgcgacaagcgccatctgttcggccagtccacgcgactagcgtggaatcgcgcgcgggtcgcgtggagtagattttgttgcctgttttaaattgattcctttcggatttggcacagaaattagccaaggaacagttgcctagttaccttaattaaaatatatgcttcatatttggttttgtttttaggcttagttactgtaattagatttatctataaataaaggcctctaggactgactcaaatcatccaggaatccaggaatccaggaaagtctggaacaccttctatattctctctctctttctcatattttcaccattggaagtcaagaatcaaggcaaggtcaccaagaatgtattatttgacagcccttggtttcttgaagcctatgtcaggctgaacttgtattgtgggaaggccatgaactgatgtaactcctctgtaacttgatttggtattgattctaatgctgttttgattattttattctactctgtgctattcaatgttttactcttaattggaattggccattctatttaagtattgagggttaggattcacaatgggaacgttggggttctaatttctgacctgtttagaatgatagttgttcttcgcctagacatagggatgcatggctacggattttataatatgttctttttcatgcttaacttaatagaattcaccaagaaattgggtttttgaattaggttaaagggttgattcactaagacattagggattaactaacttaggaaaggcttatcctccgaataatcttaacaagatcacatgagatatattctttgaatacttagtttgacagattcactaagggtttaggtttctcgatcaaattaaagggttaaatcgctggttatgactctagtagttctaggatttacgactttaggaaagatttatcctatgtgtgacttaagataataaaccaatcaagtgaaggaggtaggaacaaaagggattgtgcctgaccacaattgtttcttccattggtaaattcttttatcgttttattgcatttattttaatttctatttttattcaaccaatcatccaacatcaacaattatctctttattatttctgtttttacttccaatcatttagaattaatattattgtaaaaattaccccaatccctgtggagacgataactcacttacctactttattacttgttaacgatcggtgcacttgccgtatcaatcgcattagcgcacaacactttggttcaagtagttaaagcctcttaatcctcacttatcttgattgattcatgcattcatatatacattagaacatgattaatcatatggtaataatcattttaaggttaagtcaaaaaggcaattagattttttagaaaaactgttttgcattgttttaatcgattacccttgtgatttaatcgattaaatgcatatgaacaggactgcatattgccttatgaacattttaatcgattaccattgattcgtaattgattaaataagccttacactaaaataggcgtgctctgtgataatcgattatatcacgaaataatcgactatctaagtctctgcataactcagaaaaactatttcatctggtttaatcgattaccagattattgtaatcgattaaataagcattgatagttttttacacttcctttgataatcgattacttaggaatttaattgattatccttatgtatcaagaatcacaggtcatctggaataatcgattacaaggtgacttaatcgattattttgttcttgacatttttccagaaacctgatgaacactttaatcgattatttttaatcgattatttggttaaaataatcgattacattgacaaaataatcgattacagttagttatattagtttttttataaatagaatagcttgcattgtgttttaaaaagagtaattttgaaaaggtttcgtgcatacacttagactttcactttcaagagatcataaaacaagaaaagaagagggagattagaaaatcaaaaagggtttaagagtcatggaagtcattttctacatgaagcatagatgtaatcaagctttttgattaaagaattcatcaagaaagatcatgtgcatacattctcagtctagttagatcattcatgttattgaactcactgaggaatgagaggtgatatctttcttgagctataagcctggtttttgttgttatttgtgttgtatttgttgttgattgttcatataacaaattgtaatctttaaagtttttctagataggtttctagagggaagaacagagaggggatctttggttctagatcttttgaaaagtctataggtttagattttgaattttacctagggagggtaaaagagacctgtgtaagcttgtaaagatattatatttgttatagtgataactctaatcaaggtttgattagaaggaaactggatgtagcctctgaggttgagaggtgaaccattataaatcttgtgtgtttgaatatttctgtttatcttcatattgttcttgaagtattaagtttttgttcatattacaagattggtaacaacgcatgagtggtttgattgattaaggtgtaagcatttgtgaagttaaggtgaagaagaattaatttcttaattgttttttaaagatatgatccttcttgaaagtcttctacagtagtaattttgaaaggaattttaaaaactctgaggtataaccaattcacccccctcttggttatttgcataagtgttcattgtattttcagaattgactacaatgagacattctttcctgtatctaagaaagattctcttcgcatcattctgacactggttgcacattttgacttagaattgcaacaaatggatatgaaaatgacttttctcaatggagacctagaggaagaggtttatatgaaacaacctgaaggattctcctctactatgtaagcttaagaaatctatatatggattgaaacaagcctcccatcagtggtacttaaaatgtcatgacgttatttcttcatttggtttcgtagaaaatattatgaatcactatatataccagaaggtcagtgggagcaaatttttttttcttattttatatgtagatgaactccgcctatgtgtggttgcaagcgtggcctgtcccaagctagaataaaggaggagggttggcgtcaggggttgcgccggtcgtaaaaaaccagctattttttacatgatgaacccttatgatatttcgttggggcgttcccttcatagcgacacgttacatcgggccctgggtgtatcgaaaaatgagctagagtctttgccacaaggcaaggcgttacatcaatcccaagatgtagtgataagtgagttagggtctatgccgaaagacaaggcgccaggtcttcacccggagaggtgacaagaaggcaagggtccgaacacgcagatgggcgagcgtgacgggcaaacaccgcccaggggtttatgatgaaattgggaagctggaacataggaacattaacgggtaaactgagggagttagcaaatgtttttccagaaggaaagtgaatattgtttgcttgcaagagactaagtgggttggagaaaaggctaaggaagtagagggcactggtttcaagttgtggtatatacaggtacaaccaagagtcgcaatggggttggaattatggtcgatagaagtttcagagataaagtcgttgatgtcaaaaggaaaggcgacaagataatgatgattaagcttgtagtgggggatataattttaaatatccttagtgtgtatacacctcaagttggagtatacaggtacaaccaagagtcgcaatggggttggaattatggtcgatagaagtttcagagataaagtcattgatgtcaaaaggaaaggcgacaagattatgatgattaagcttgtagtgggggatataattttaaatatccttagtgtgtatacacctcaagttggagtattatcaaatgaaaagaaccaattttgggaagacttggagaaggtcctgagaggaatctcgcgagagtaaaagattttcctaggaggagatctaaatgggcatgttggtataaacaatggaggttttgatagaattcatggtggttctggctatgggatgagaaatgaggctgaagaagatgttttgaacattgcgctagcctatgatttgatgctagcaaacacttttttccggaaaagagagtctcatcttatcacgtatcatagtggccaaaattgtagtcaattgattactttgtggctagacgggaagatagaaattcttgtattgactgcaaggtttaccctggagaatgtgtggcgacacaacataagttggtagttctagaggttaggttcaacaaagttcttaatttgaggaaaaaagcttaaaacctaaggataagctggtggaagctaaaggaggagaaacatatagagtttaaggaaaacatgttacgtgaaggacaatgggagtttattagagaagctaatgaaatatggaataagatggctatgtgtgttcaaaagttgggaatgagagtgctaggtgaaagtaaaggaaacaaagttcttacaaaggaaacatggtggtggaatcgataggtgcaagaggctattaaacaaaagaaggcatgctttagatctttgcataagtgtcccaatgatgagaatttgcaaaagtttagagtagtgaggaaaaatgcaaagaaagcagtgcgggaagctagaggcaaagtttttgaagatttgtataaaaatcttgggagcaaggatggggagaaaggtatttacaaacttgcaaaaatgagggataagaagagtaaagacctcacctaagttagatgtatcaaggatgaaaacaaaaacttttggtaagggatgaagatgtaagcgaaagatggctaaactactttaacaaactttttaataaaaatggcgacaagagtgagaaggatttggaggacgtttttgatgatctaaatagaagatatgtgcatagaattaatacacatgaagttaaggaggctttaaagaggatgaagaataataaagctttgggacctaatgacgtccctattaaagtgtggagatgcctcagagatgtgacaataaaatggtttaccaatctttttaataagattctttaaacaaataagatgtcagatgcttggaggaaaagtatgtttgtgcctatttacaaaaacaagggagatatccaaaattgttcaaactatagaggcattaagctcatgagccatactatgaagttgtgggagagagttatcgaacatcgcctaaggagggagaccaaggtttttgtaaatcaatttggatttatgccaggaagatgtaccatggaagccatcttcttgatgagacaattaatggaaatgtatagggaaaagaagaaagacttatatatggtgttcatagatcttgagaaagcatatgatagagtcccaacagaagtctaatagtggactcttgagaagaaaaaagtagaattaaagtatgttaatgcaatcaagaatatgtatgatggggctaccacatgtgtgaaagcttgtaatggaacatcaaggtattttcctatcacggtaggtgttcaccaaggttcggctcttagtccttatcaatttgccatagtgatggatgaaccaacgaaagatattcaagaggaagtgtcgtggtgtatgcgttttgcagatgatattgtgcttattgatgagaccaaagatggtgttaataggaaattagaattgtggagaaacactttggagtttaaaggattcacgataagcaagagcaagatgagaatatatgaagtgtgagtttttgagagtaagagacagtgatcaagacacagtgcatttacatggtcaagagataccaagaaagatgtttttagatacttgggatcaatgttgcaaaaaggtggtgagattgatgaagatgtaaatcatagaattagagcagggtggacgaaatggcggagttcatcggggtttttgtgtgaccacaaaatttcccttaagctgaaaggaaaattctatagaatagttgtaagaccgacaatgctatatggagtggaatgttggccagcacatagacaacatgagcataaaataagggtagaagaaatgaggatgttaaggtggatgtgtggatatacgaagatggataagataagaaatgaggatattcgaagaaaggtatcagtggtaccggtatgtgaaaagatgaaggagcatagattgaggtggttttggcacgttatgagacgactactagatgctcctgtaagaacaagagtttcttaccaagagctcgacacaaagaggggtagaggtcgatcaaaacttacctggggaaaggtagttaaacaagacctaatggagtgggatatagattggcggataatatgtcttaggatggagtggagaaaagctataagtttgatggatgattaaacccattagtagttctatgttccagtcattcccttgttttaattattttcctcttcttttcccccttcttcctttcacgtttttttctctcttttgtcttatttccacttttttcttcccctctccctttctctttctatctcatttaagacttatcattgggctcatctaaaaataataggaatacttcacaataaccaagaggggggtgaattggataaaaaccttggtattttaaaatcaaatcaaatcagagttttaggatctttatcacttacaaaccaagaaatcaatttactcaatcaaatgtctcagcccaagaattcaatagatcaaaattgaacttgttgaacaatgaatgtgaatcaaagaatcaaagattaatgaattagatgagaatagagatatagaatcaacacacaagtaatttatactggttcacttcaaaacttgaagctacatccagtttcttccaaccaacactaggttagagttccattattataaaatttcagttcttacaatcaattacaacatctcccctttatcaatcctagataaagatcagaaatccaaaacactattagattctaagagacaaagaaccagagaacactactctgttctttacactagagaacccttctctagatacaagcaagaacccactttacaatagcaattttacacagaacaattaaggagagagataacctgatgatccaatgaatgaatgcatatgaattaccaaatcaggttgagaagaaatcaaactcagaacacacttctccataatcttgaaaacaatcttgttcaagaatcattcaaagatccattgatgttttgaatatagcaagaagtaaaaacacttagaaaatcacttagaaatagcttgaaaggcttgtgtatactcagaaatacgaattatcaagttgtaaaataagctcagcctccaactccaaccctatttataacagaatttgtaactaactgtaatcgattaaatgcgcctaataattgattatttttcttatgcaatcaattataataactctgtaatcgattaaactgtttaagaatgattctgggatttgcaatcgagcaaaataatcgattatcccgatgtgtaatcgattaaaatagaagttttaaaagttacaaattacattaagtaatcgattaaaatattttgtaatcgattaaagtagaaaacatatattttcaaattggatgtgtaattgattacaatccatggtaatcgattaaatcagcaaagtgatttttcatatatagcctaagtaatcgattacaatctgtggtaatcgactatcacagcaaggcttaaaaacatgtttaactatgtaatcgattacgatccttaagtaattgattaaattcattaacaaagcagttttgtttcaaacaagtatcaaataatcgattatcccgataggtaattgattacaatgttcataaaatattttccagatagcttgaagaacatattaatcgattattaccttaagtaatcgattaatccagtgaaacttagcatttttccaaaaaaatttcacttagattgaaaccttaatcttattattaaatctttgttactttatttgaaaatcatttatttaaatcaatgaatgaatgaatgcaaaccatggatcaccaaattaacctttctcttacacttaaatcaattagaacttcaaggcatccaagcatgttgaaaagctcaaaatcaaacttgaatcatatgcttcgaatcttcatgatcctccccctgtatccaacatcatctactaccgaccccaattaacttgggttaaaggtgttgttgatgttgattttgtatgtagatgatattttacttgcaaccaatgacaagggtttgctatatgaggttaaacaatttctctctaagaactttggtaaacgatatggtgatgccactgttgatttgagggggagctacataaagattacatgaagatcaagcaatgtgaagtcttggatgaagttttggctttcaacatgcatgaagctttgaagatgaaagtttatgtttaaatgtaaaaggattgaaagcattctgatgatccaagctttgcatgcatacatttcatacacattttaagcattgcatcatataagctttaagtaattgttttaaagattaagaaaaagctaagtgttttggaaaaatagcctaaaactagtttaatcgattaatacacttagagaatcgattattttgttcatcaagctttctggaaaattatcatgaacattttaatcgattaccacgtcaaattaatcgattatttgaactttagcatacttggaatatggctgtgtgactggtttaatcgattaccacataaccgtaatcgattacatggttgttttgaaaatatagtcacgctgccttaatcgattaccacttcttgtaatcgactatttagttcatttcatgttttgcatccacgctggcttaatcgattaccaataattgtaatcgattatattacacacatgattttttaacatggtctggcttaatcaattattatggactgtaatcgattattttacttaaacatgattttatgctcagtctgttttaatcgattacacgtcgggttaatcgattattttacccgttaactgcaagaacttaccaagaacattttaatcaattacaggagcctgaggagcgcttttaatcgattaattttgttacgaattttagtataaatagaacccttgccttttgtgattaacaacagagagaattaagtacagacatgatattttcgaattctaagcattgaaaaagctttctaaggattcacaaaggcattcttcacggttcataaggtcttgcttccattgattcatctatgggtcactaaggatctagtgaagcaaagcaatctttcacaaaggctaaggaaacttgattctgcattcatcctgagattttcattattatgcattttattcttggatcatcaggtgaattctttccttattctttgtgggtgtaaagttttctattgtaacttttgatttggttgattctattgtaagagggttttcttgcaagaggagatagtgtttctccaaggacagctgagtagtattctcagtgtgggtgtggcttctaagggtctaatagggttttagatctctgaacttcatctagggttgatgaagagaagcttgtaattgcttgtaagaataatatttacaatagtggaactctactctagtgttgagtagaagaaactggatgtagcctcatagggtttgaggtgaaccagtataaatcttgtgtatgctttccaattctgcaaacttaattgtttttcttgtgaattctgtttatatgttggttcttgaggcattacaagtcttggattgatattggataaagattcttgattgtttttgtgataaagatccaaagggaaaagaaactctgattttaagaaatttttaatttaccaaggttaaccaattcacccctcctcttggttaagtgtgaagtgttccttattttcacagccacttgcgttattgacatcaagagacaaggtaaaaggtgttcttggtttgtctctagagacctatattaacaaagttttgaaaagatttagaatgagtgattgttcaccaagtgtagctcccattgtgacgggtgacatgtttgatttaagccagcgtctgaaaaatgatcttgagaggtaacaaatgaagaacattcctcatgcttcagctattggaagccttatgtatgctcaagtctacacaagacctgatattgcttttatggttggagtgttaaggaggtatcaaagtaacccaggttaagaccgctggaaagttgcaaagaaagtgatgagatacctttaggaaactaaggtctacatgcttatgtacagacgaattgacaacttggaagtgattggctacttagattcagactatgttgtctacgttgatttgagaaaatagacttcggaatatatttttatgctagccagtggagttgtgtcttggagaattgtcaagcagacattgactgctacttccactatggaggctgagttcgtttcttgttttgaagctacctaaaatggagtatgaatgaggagtttcatttctgagcttagagttatggattccatttctaggtcattgaaggtatagtgtgataattcagttgttgtttttatgactaagaataacaaaagttttagttgaagaaagcacatcaacattaagtatctagccataagagaacgtgctaaacataatacaacggttattaagcaaattagcactaaattaatgattgtcaatcctttaactaagggcatgccaccatttaaatttaaggatcatgtggaaggatgagacttggtttccatatgtgattttaattgtaagaatgatactaagaaactctattatgatatttttcattcagtttatgcgcatataaagtatttattctgagaaacatcaattaagtttaaacctagaataaacattggatttattcattaagttgtatgggcttaagaaatataatgcaatgtaatacatgtaagataatacttgtatatattagaggaactatcgccatatttcatgtattttatttctcactaaaatgtatgatgagatatgtagaccaagtggaaaaatgttggtttatattctgttgcttgactaagtcaaaaccacataaggtggtccactcaccccatcttcttaggaataagttgttgttgatcttatcccttattttcagccactatgctcacattttatacatataaaaaatcaacctctttgatgggaagaggttataaaaagagatgtgcaccatggccaaggtccctatgcttgctatctgaaaaatctcaatacaccatcagtgagtgatagtaaaagcatagaagacccttaagccaaaagttagattagttttaagacttaaactgtttacagattactcgactaacagacaattgtaatttcatcttcggaacaaacaagaatagcaatggcaggaggtatttatgatcttaatttttttcacatttgatctaatagcttctattgtatataagtgtgattagatcatttagtttttcttacagttcctacaaaacatataaaaacaaaccaagatcaagcataaaaggcataaactagtacatcctagttaaaccttgttctttagttcaaactttactcaaatggacataaacaaaattcaaaagcacaaagaggtatcaactaattgtcccaaaattacaccaaaacataggaatttatgacaattatcaacagggtttttgatttttggggtgtcatggaggacggggctttctagagtgtctccagtgaggttcaagttcttttggttggagagtagggtgtcacgtggagtgtggcaataaggtggcagcgtagtttggattgcgagatgaccaatttacccttgatttggtttttgtgggatttataaataaaaaaaatgtattgagttgttctatgtcatttctaaatcgttgtctattgaattgttgtatgtgatttgtaaatcgttgattgctttccaaatttcttgtgtgattaatttaagttgaaaatgtcgatggaaggaatgaggatactggagtttgcatttagatatggtacaagaatttatgataatttttagttggcaaaaataatatgtcaaaaatataattaaataacatctcaactttatttaatactaacattgatagggaaagatcaaaataattgttagactattaaagattaagatcgatcaatttttttgttttagagactacatcaacatcaacatcaacagcacctttaacccaaattaattggggtcggtggtagatgaacccaatgataaatcgaaaataaaacaaaagagagaaacagagttaaaataaaagaatggtgagaggagaagagaaaagaagaataaaagaattaaaacagggaacaactggaacatagaactactaaagggtttaaccctccatcagacttatcgcttttctccactccatcctaagacataccgtccgccaatctaaatcccactccattaggtcttgtttaactacctttccccaggtaagttttggtcgacctctacctctctttgtatctagctcttggtaacatactcttgttctaacaggagcatctaatggtcgtctcataacatgcccaaaccatctcaatctatgctctctcatcttttcacatactggtaccactgatacctttcgtcgaatatcctcatttcttatcttatccatcttcgtgtatccgcacatccaccttaacatcctcatttctgctacctctattttatgctcatgttgcctatgtgctggccagcattccgctccataaagcattgccggtctaacagctgttctatagaattttccttttagcttaataggaatcttgcggtcacacaaaagccccgaagcactccgccatttcatccaccctgctttaattctatgacttacatcctcatcgatctccccacctttttgcaacattgatcccaaatatctaaaaacgaaaatttgaaaataaaaaataaggacaaaagtataatttatctatatttttttctttgggtccgtgatcccaaaaatgtagtgtttgctaattttaaagttctagtattgggctattggctattgattaatcactactacaagcagacgaagtcaaataattcactttatcaatgtatttgtatgcaactatgatttgttaattgtatttgtcttcgtttctccaataacaaaacagcgcagttcgcacgcattgacattacgttcttttatattttgcgtgaaatttaattgtctaacaaacgaagttatatgcgtttataatatattggtactttgtgatatctgacgtcatcaaagattagatgggaaacagaattggctataccaatgctatggtatgaacgcgattgttaggttgattgagttgattaaattaagtctcagctcacgaagtgtggaaacaaattcatgtgaccaaattgtggataaataagttaatggtcaactcgttaatgatataaataaactatattataattttaattcatgggaccaaattgtggataaacaagttaatggtcaactcgttaatgacacaaataaattatactatatacaaaaagaaattttatattcaccaaaaatacaaaagaaattgtataataatatttttgtcatgtgaattctgatcttttccctcaaattttaattatgtcatttagaaattgtatcattaatactttgtagctttaaacagcagtatttatcatctttattattacttttttatataaatatttcataactctttcttttcaccaattatccattaaatttattatttccctcttcttttctcctccctcaaaatccgaacatataaaataatatgtcaattttaaaaactatttagtattacatttacaatttaggattgcaggaatagtgtaatattgtacgccgtcatattactatttttaaaaataattctttatgtcaattgttacgtaattgattgttttttagagatacataattgatctagaatgtcgcgttaaaaaagattttctattaatgttcatataatttaggtaaaaaatgacttttaaaattaattttgaaattgatgcacaattttatatctacttcctatatgtttgatctcacagctcacgtagaactaatttagaaacttaaaaatataactgatgtgaagaatcttttttgtaacaatattttcaaataatttcgcacgattagtttttataatataatattcgatcataattttaatttaaataagaaaaataagtatcacagcgagataaattgagaatccatttgacttttcccatcaccattacccgtaatgcatggttgcgtttaaaaaaagtcaggatgaaaatttaggttttttgataaagaagtggtgtaacaaaaattaattactatttgaggatattttttaaaaatattatcgaatggagtaagtcgtaacaagttttccgactttctgattcataagtcataagtcgtaacacatgttattagtttaatttttttttcccaattttttaactaaagtatttactattcttgacgtcttttttttttttttcttagaagtcataagcagcactacggacttatgctttttttctttttttttatatactatttctgtttcttttttgttgcttttttatacgatttctttttctattttttttgcttttttaagtggaaatttaattatttaaaagtataagtaattttaatttttgtaatttcatttaatattttgtatatatttttgtatcattttatttaatatttttgtaatttatgttaaaaataacttttaatgaaagataacttaactacttttcatattgttttttttttccttttgctttttaggtggtaatttaattaagaaaagtagttaagttgtatttcattaaaagtgtaatgaatatgaaatgtacattacagagtaaataaaagtaaaaaaaagtagaaatcatattagttattatttttcttgtatgaatagttaagacgattatgtcctttggtggctttttgacaaacaaggggtaaaaaaattaattaccatttagggatattttttaaaactattaccaaatggggataagtcgtaaaaatactaaaaattaaaaatataaaaagttatttttaacattaattactaaaatattaaataaaatgatataaaaaatacatacaaaatattaaaatattaaatgaaattacaaaagttaaaattacttatatttttaaataattaaattaccacttaaaaagcaaaaaaaaaatagaaattgtgtaaaaaagaaaaaaaaaagaaacagaaataataaaaaagagcagaaaaataagagagaaaaaaaaatcagaagtagtagtgctccttactacttcgaagaagaaaagaaaaaaaaaaaaagtcagaggttataaatacataaatacacttacaactttagttaaaaaatctgaaaaaattaaagtcgtaaaaagtgttataacttttaaatcataaagcataccatgacttactctcatttggtagtaatgtttttaaaaaatactcccaaatgataattaattttttttacctcttcttccgaaaatttatgctgaattcaatgatttgtttccccagcaaagttgggatacgcatccaccagctagtccggattttattttcacgcctaaaggaaaatataattttatggtacaatccgtttaacttgttttataattaaaataaatagtgtagcttatgaactagttagggttcctagtaatagtatcatctttacgtagtctccaaatctcttatcatccttagtcttctattgcctagttaattatcaataaaatgccataagcttgttcccataaaaaaaagtaataacgtattaataattgctttgaagtattgataagttttaaatttttttataaggaaaaaaaggttaaatattttttcatctttgtaaactgataagcgtccccacccacaaactaacaagacactttcaatatgttttgtcctcattcacatatttttttcaaaattttcacaaaaggtcatcattatgaattttttaagttattcactactgaaaagtatatgcatcttattaatatatatatataatattaattaatttctttaagttattcttaactatgaagtctcatacttgcaaggtctttggatccctctcatttgagtattattcaaatcattcatgtatttctctggctggaagcctagctaccaaagtcacttattgtttgtgcctcatctcttttgcaccaacaatcactcctcgccctcgttagtgtctaagatgttacatgtccaccaacttttacttggttcatcatcgaaccaaaccgtactagctaggagagagatacgtttgatatcacttgttacactcgactattttcaaggttattggatcttcccatagatcaacatgagacttttccgtgtatattatcttcactcatatacttcttgggaaatttttttgaaggtcaatcatcccataattgttttaagtcaaacacaattaactttgtagttcttaagtaatagattataaaaaaatatgcattttatagattataaaaaaatatgcattttatagatataggctgataatactagttaattcttttaattaagtcatcatcaagtatagaatctcatatctacaaagtcttcaaatctctctcgtcagttatgttatttgattcatttatatatctttcctgctagctaaaagcttgtccgaagccacccatttcccatgcatcatctcttttaaccaacaatcggtcttagagctagcttaagatgttacacatgatgccactttcatacatccataggcggacgcaggggggctagggtggcccccccctcccctaaaattttattaatataaattttataatatatatatatgtgttaaaaattaaatttttttttaaaaatttgataataaaaaaggtgtggtattataaatgtgtgggccaaatgaaggtcaacccataatcatcccgtcgtatcttaggggctaaaaaataagatataatattttttaatattgcattaaaaataagataaaatatttctaagattgcattacatactataatagaatatctttaagattacattaccatataaagataaaatattttttaagattgcattaaaaaatgggatagaatatttttaatattgcattcaaaaataggatagaatatttttaagattgcattgcataatataaaatatttttaagattgcattgcataatatgataaaatatttttaggattgcattcaaaaattggttaaaatcgtatgcttaaattagtataaatagaaacatatttttgtgtttataatatgcattccattccaaataatattaaagctttagagagtttatgtttgcatcattgagataattgttgttagatcatatagaagcgtttgacaagtctgattcttcaactctccatcaggatttaaaggtacctatttgcttaagaaatagaatagtaaatgtaaccattttattgtattcttcttattgactttggaagaggtcgcagcaagaaaaacaggatatcagttctatctctgttcttgtgaattgagacgtgcgacttctagttggaaaacaaggatatcagtctgtctctgttcttggtgaattgagacgagaactttttgctggaaaacaaggataccagctaggataattgttgtgtaaggatagactagaaaactaggatactaagaactcttgtacacaaaattatcatagtggagatgtccattggattgattgtccaatttggacgtcccattagattgattgttcaatttggacgttgtgattttttacccaattgggttattcatgctaaaattgattgtgtcttctttatcttttatctactcactagactttgtcaacttgttcatcaatccaccctgtttgtaatttgtctgtctgtgaagataatcaagatcagacatcgaaatagaatggaagatcaatttcttgatgattctttgattacatacattgaaaaagaaattgttttgagttttagcacggattcaattataaatgattttaccaatatgaaaacacgtagattaagagtcaagtaaagtgatcttaatgtctgtaatatttttttttgtatattagatttgtattgtcttcaaagtatttttatttatgatatagtttttttttatatttgtcccctctcaataaaattcctgcatcatttactacgtacatcatcatgataggattactggataagaaagtaacaagtgatttttcttgtaaaattcattctcagtcctttatatacttttatgagactgaaaaacgttagatttatcataaatttttagaaaagttgatggaatgtaacaacgtctatagcgttaatgtttctcttgggacagaatgagatgacagccatgagacaatattcatactgttaggtaaaagaccaacatgcgttcataataccctctgttgggtaaaacctggggtttgccttcaataccctcaaacacaaatcaaatcaaaatgcagaaacgtaacatatcaaaacacaaggatagagatgtagaagaacacaatcaaaatagttttacatgggagaaaaccttcttcaatgtgaagaggaaaacccacgggaccaagtccagaatcaaatatccactataacagtaactgattacagaggatcaaattacaccatgttggtggctaactcaacctctccaacaatggtgataatcaatcaaacctagagtgtttcactcaaactttttctaggaatctttcaaatgcaaagcatgcaagcttgctcaaattgacactcaagaatgtctcttgatgctctcaaatgcggagtcacactcatgctcaatctctcaatttcgcctctctcaatctctgctctggtcgatgctatgcctccatctataaatgtcatatttatagagagaaattaggtttagggatttcagcaccctaaactggaatgggccgaggtaaacaccttggaaattggacccaagtcaaatattctttttttcagtgcataggaatttgggccaagcattaaagcggaaattatccaacacatacatgatcataccaagatggatccgtaaatataaaggacttttcttgtacaagtaattcctaatcttctatattattatttttattagtttgatatcaacgttggatcgtaaatttcgacattttgtagatcacgtgcattaataaattgtcaactaagcatgttgaaaaacatgactaaaattaaaaccagagttgttcatccctttgtctaagtcaaataaacaatataaataaaatttataattaatatatccagcacgtatatataatgtgcgtcagatttagaaaatatattagaatggccacttgtgattgttaatctgtaacaacgttacccttaaaataaagtagaacctagctagcattattaggaatttcaaggtagttaacaacaattttagccagtaaaaaaaaatattaatatcgcaactaccgtaaaagtttaagagtcatgcaagttggcttaaaaaacatcaattcaaacttttaaaatgcacaaatatccgtatgtattgtaaacgtaattgttttttaattacatgttatgttaaacattataacaactttactaattaacaaacataaaacgataactccttttaaaaaaaaacataaaaccataactaattaaaattgctatatgttgttttacgctagttatattaagtttttaattatatttcaacctgcagtaaaaaaaaaaaaacttgtattgatgctcttaattattctaaataaaataaaatgacataagtttctggtttaaaaaattgataccatagcttattcctttttttaaataatctagtatagtatttgtgagtacgcacagatgatgccgacactactacataaaggtgttctaatgacgtcggtttaatgtcgattgatccaaaattgacttagaaagaaatgcgatgacattcttttgtaaataaatacaataattctaagacggtttcgcaaaagccgtcttagaaactatcatactaagacggtttttgcaaaaccgtcttagaattattgtcaattaaagacggatttcagaaatcgtctatgaagacatttttcttttttttaaatattttgatgtctctactatgtgctcttagctttttaaaatctaggtttctccaacatcaagcgttccttttgtctccaacgttccccctcccgacactttcctcttttggaacctctgcagagccaagttcagtgttaccccagaacccctatcgggtatctacgtcgccctcgtcgtccacaaccacgtgaccctcctcattggcaattccacaatggtaattgctactatttcgttttcttgtcttcgatttatacgatgtttgattgtgtctcgaatccgatgaataatgttgtgtgtgtttacaacacaaaacagccaaagcagatccacgagattaaggatttccttctgtcggcgcagatccaagtacttgtacacactttgtgtctttgaccctgagaaagccgataaattaaagcaatctcttcctcctggttagttaattttactattacttttaacactatttgtatgttatacgtggtatgaaatgggaaagttagatattgagcacaattgaaatgaattgctcatagtggtttattttatttattttgacgagtactgtggttattatgtatgtatttgtagagtgagtgagttttgactgtgggctgctccagcccctgctgttggtcttatcttttgttgaaacttgaaattgaatctctcaagcttcctcttttaaaatgttagggatcgaagcagaaggaagtaagtaataagagatgggagtggatttgagacaagtggtggcaggtgtcctcaccctcacaatgtttgtcatgcttggaaatatgatcaaaagagaccactttgataattcacttcaagtaagcacaccctttttttcattttcatttgcatttgcttgctcacaccagaaacaacagtataactaaattcatcttaagattgaaaaccaaagcctttcttctacaaagcttatagatcccttgtttacactgacaaactagagtgttctaacaattagaaacaatgtggttgtgtgcctatttctcactgtttgtcttaacagtaccactaaatgtcttcctaccaggtatgcgatgcaagaaagagaataccaagagttattcaagaaaatcatgagcacacaaaagctgtaacatctctttgttcttcagatgataggctatactgtggctctttagacaaaaccatccgggtaacctatcttcctatgtcacaagaaaatttggactaatacttggttagccaatattttatttttatgtttgcatctctcatcattagttgatttcaaacttgttgataaacaactaagattaagttatcatgtactctacaatgattgaaaatagtagaagagtgattaacatcttgcatgaattgatttgaatgattaataacttcttgcactaatgagcctatctacctacagtctttactccctagaacattaaaattgacaggtatgtgctttcccacgtctaaatacgttccaaactttatttatcctcgtttctgcatttaacagatttcatttatctttggtcattgatattataattgactagtagctatgtaacattgtccataaccttgttgggatcagtgatttgaaagggaaggaaatgagagtgaagtgcaaatgatcgtttggtttctgtgtttggttagagtagatatacgatggagaaattgcaaaaatcagtcgcctcaccataaagtaaatccctcttcaaaagcgatgaaaggagaggatttgtgaacttttgtttgttttaatttgttaaaaattaaatattttaagaaaataataaagaaacaatgattgagtaagcgttattttttgaattgctataaaaaatattttaatttgttttcactttttttcctactcatccaaacaatcaaatggattctttttcatttttcctttctatttttagttgttccttaagaatggtctatggcctttttgaccaagtgtttaagagttttgtccttgttatcccaaaaaggcacctacatgaacacataataacacaatcttttaagagagacaatccttgacaatttatatatcacctcttgcatgatttgattcactgttaaaaaaaaaaaagagaagtggaagaatcccttggtttatttatttttcaattatcccaggactgaatattgtggagtaggcactctggaaagttgttcctcattatttacattagtagtgctttaaagaaggtttgtcatctttaatttatgtcaactaacttgtacattctttccctttaagatttccagtgcaatttgtccttccttccagcacatacgaaaaccacttccattgacttgcactccaataaagtttggatcttggatgagaggtgatagagatggaaacccaaatgtgacagcaaaggtagcatcttcaaatatccattcatgttgcctgtagttttactatgtgatttcattgtctcaaataactatatgattctttttcaacatgtgagaagttttctagtagtgaaagcatagttgaatctgtaaaatcattatattattgacaacttgaaggtgtccagtattagtgcctttcattttggaaagtgcaagtttaatgatgattgtactgggaaaattgcagacaaaaataaatgagcttttaacatgaaaaatatttgtttgaatactcttcttggaacttttccaatattgtaccttttagtcaaattttatattgtcttacgctagaataaaagtggtgggtaattttgggtagttgatagccaatgtaaaattacattgaatgttttttagtcatgaatagcctgagaatttggtttttaaccgaactcagtgacattgtgtgatccaagtagctaacatcactattgttgttattgttctttagacatggacaaaaaaaatggcttttaaagaaaaattggtttttgatagtaattgatccattttgactccatcaggtgtgggataaagcttgtggttggtgttgatgttactatagttgaaggatgtgatttgttgtttcaattactaaagtttgtagcctataattcaaacattattaataaattgcaagattttttttctttcctaggagttggattttcttgaagaatatttaccagtttgatttgaccctgtaattcaaatctgattgtgtaattggttttcgttttgttcttcaggtcacaaaaaatgtttcgcttctgtcaggatggatggcaattgacctctacattcgggaagtagatggcctgagatttgagctatccatgaaccagtgcagtgataagttgtcagaactggcacatgaaattctagaaggtttgtctgtttagttttgtataataaccaaggaaaaaaaataaaaatttggtgaggcttctggttcccagtgcggatagcgccagatgcggcgctgttagtgccaggatggcgccagatgtggagcctgacaccgttcggattagggagaatctaacttctcctacacggccagtacagattcttgataggatggagaagcaaatttggagtaagactattcccatagtcaaggtattgcgggaaggaaggacacctgaggaggcgacttgggagcgggagcaggagcttttgcagctgtatctcgagttgctagacaagtatagctttgaattttgcaaacaaaattcttaaaaaggtggggttaatataataaccaaggctaaaaaaaataaaatacaataaaaaatttggtgaggcttctgattcccgacgcaaatagtgtcagatgcagtgccattagagccaggatggcgccagtagtgccagaagtggcaccattagtgccaaaatgcaccaaaaggccatttctctgtggaatttggcgcgattagcatcagagtgacgctctggaatttgacgccaatagcgctagaatggcgccattagcgcggggacgcgagctgagtcactataaaaggcccaattgcacattttgtgagccaaaactcactctttttcttcctctatgagtttctaccatgttaagcaagaaaagcttcacaatcactcattccttgaccaaaacacttcatgtccaacatgaaagttgaaggatatcacccaatgagctagattccaacctccattttcctttaaaaccatcaaacagagagatcgttttctttagggaacttcacaaagttggattgtggagggaaaagaaggcgttttaagaacattcaagcttggagaagtttcctctagccttccttttcattttagagttaagaaacgcaagttttatcgattatttaagaatttgttcttgagatgaatagtgacccatttgagttagagcttaaattaggcttgagtcctttagaaaagtatgcttaggaggttgttgtgatgaaggtttagccttgaaatattaattttatggactttggaatttggttctgagaaatgtatgttgaaagaatgttggctgaattgatgatattatgggatgtatggaccttggtgccttcacaagatgtgtttaggagactatgtaaacggtgaaaatatgttgaagtaactattttaaccaccttgataatcattgaaatgtggcatggataaagtattaaactctttgaataggttgatgcagagtcttagggagactctggtgccttggttaggcagagatagatcctgttgggggtttgtaagtcaccaattagatgactagtccttatgacttagaaaatagtttatatggaaaagaatagtgttccttttcattctaactgttgagaaccattattgattgtttgtatacctttatgtaaggcgtgatacagaggttattggtggctgtgaccacgaggccgggagaaccagtgtagctcttagagcaagtaagctctttgtttttgggagtgttttcccttgactatgttccacaatactcttagggagtgatggttattgtatgtcatgatgcatgtggtattgaaaatgtgtgttactgcttttattgagaacatgtatataatgtacactctgatgatatgttgcgtgattgatgagattctctggccagtagaatagactacttatggactttctttggaaatgtctccttaagtggatgatcttccctcgaaagtgccatatatgtccgagtaagtccttagagaatgtgcccttcagtggatgatctttctcaggcattgacataaagtcctgagggagtgtgcccttaagtggatgatcttcctcaggcaatgtacgcagagtcctgagagaatgtgtccttaagtggatgatctttctcagacaatgatgcaaaaagtcctgagagaatgtgcccttcagtggatgatgtttcttaggcaatgttatatgcatatatatttgctatatctgtgttgcattcctgatgttggtagtgcccaacggaatgacacctgtgttgtgatatacgtgcgatgtggttaatgagagccgtgatggccagattgtgtgtgatgccaattttgatactatatgtcatggaagtgaaccagggggaggagaggcttccaagaaccccgagtttattgagattgtatctcatcccgtgtggggattatatttttccaggtgatgctcagtgagcagatggtggatcccagggcaagaggcccgagtagggatatggttctgtgtgaaccttaggcattttattttgagagcatctggctcatttcttttgttatgcctgtatttgtacccctgaggggaggttgcactattgatgtactttttgtatatgtggtatatatgagagatattgatgtatgttgagaggacagggtatatgataccttattttgtacagccattactgagatatatgaatatggcttatttggtcctttggttatatgatgtgtgtaattaccatacataatgtaaagatgttattgttgatgatgtttgatgacgtcattttgtttattgctttcgaattgattagttttaattaattgctgcgcttaacggccataaatgaatgttaatgaaccggatgcatacgggacattgcatttttatggtatcagagcagtttcatagggaagcattatgtatgggatttgtgtattattcaaaactattttatgtgttcattatgactattgcatgtgtggtcactgagtgtggtcctaatcaactcaccctttatgtgacatgtgcagtgccatggtgaggacccggaacaacaatgagacggtgggtgtcgatgggcaccctgacccagtgacaactgccttgacagctatgcagcattagatggttgcaaacaggcaggcgaatgaggccttgttgaaggccaatgaggatttgatggcagagttgagatctctacggagagaggacagaacaccttttccacctcctgctaatgagggtgagggtagccatcacctgggtggaggtagccatcgttctgatgggcctagccaccatagaggggattggttgtcccaagttgatgctgaagaggatataaccgctagagggaagatgctcattgccttttgcaagcatgaccctccaacttttcatggggaatatgattccactgctgctgccagatggctgtaggctctagagaagatcttcacagtgatggaatgcccagaccaccagagacttctctatgccacatatatgcttcagggagatgcgcatgagtggtgggttaccacatctcagttgttgagaggccagggtgaggctataacctggaaaacttttgaggtctagttcctagacagatattttcctagagatgctagagaccaaaagcaggccgagtttgagggccttgtccaaggacggatgtcagttgatgagtacttggccaagttcaatgagttggctaagtatgcgcatttcaggaccttgatgtagaggttcgtgctgctaagttccagagaggacttagagagagcattgaggagaaaattgctggtagcggatcccgagatttgggtagcctggtgagacagtgtcgccaggtagaggatatgatcaggagacgtagtggcaaccatcctatttcctccaagagacaggaggtaaggagaaccagtggtccaggccctgtcgggaagggcaagggcagagatttgataattcattctctagtagacaggttcaagaagggccctagttagagaggagcgccacagagaccaattccacttactaagtgtgctacttgtgggaggaatcattggggagtgtgccccaccggtccactgatatgttatacatgtggcaagcatggccacaatgctagagaatgtccccaggcaggcggccgagctttagccgctcctatgattttagtggcacctactgcaggtcggatctacacagtggatgctagggaggcagccagagctcctgacttgatcagaggtactattttgatagatgtgtatgatgtgatagtcttgtttgactctggagctactcactccttcattagtgatcgtactgcgttagggctgaacttgcacatgttcagactttctcctcctatggaggttactaccacttctaaggagcagtgtcgagtggatatgtgctgcagagatgtgcagtttcagtttgatcgattaccaaaatttgtaatcgattacacagttcattttttgtgatactgagccttctgccttaatcgattacaactcggtttaatcgattattttgctcgttgctgaaacttagaatccttctttaacattttaatcgattaagtgataatttaatcgattacataagtgttttaatcgattagctggcgcgtttaatcgattatagttagttacaaaatctgttataaataagtttgaaggcttggcttgttttctaacttgaccacttcgtatttctgagtatacactagccttctaagtctttcaaagtgattttctgagttctattacttcttgcttcattcaaaacattcatgagtctttgaataattcttgagaaagaaatttttcaaggttaaggtaaagcatgttctgattttgtttgttattcaacctgacttggtaactcatctgcattacattcattggatcatcaggttgtttctttccttaatctttggttgtaaatttgttttgaatttctgttgaaattggctattgtaagtgggttcttcttgcttgggtctagagaagggttctctagttaaagaacagagtagtgttctctaattcttgctctttagaagtctaatacgtgtttagatttctattctttatctagtgttgataaagagaggttttgtaaaagcttgtaagaacaaaaatttataatagtggaactctaactcagtgtgaattagaagaatctcgatgtagcttctgttgtgaagtgaaccagtataaattgcttgtgtttttgtttttctatctctattacttatcttgttcattgattctttgattcatatccattgtccaacaagttatgttttgaactattgatttcttggggctgagttatttgattgagtaaaaagatttcttggttttgaaagtgataaagatcctaaactcttatttgaattaattttaaaataccaaggttttaaccaattcacccccttggttattgtgagtattcctattatttttaattggcatcaagagctggttcttgagagttatccaagatcactatcttttcttcaaaaagaaaaatgaatacctcacaaattacctttaaagaaggtgtttctctcaatcgtcctccaatgtttgaaggagagcactttagtttttggaaaaatagaatgaaaatctttattcaatcaaatgacccaggtgcttggaatgctatagaaaagggtcctttgattcctactaaaactgttggcaatgaaatgattcccaaagaatgagatgaaatgatagatgctgaacagagagttgtccaatatgattttaaagctaaaaatatgattacctctgcactttcttctgatgaattttttagaacagtgagatgcacaagtgcaaaagaaatgtgggagatgttggaaataactcatgaaggcactaaagaagttagaatatcaagaaagcatgcattgatccataagtatgagatgttcaagatgaacaccatagaaagcatttctcagctacaaacaagattcactcatatagttaatcgtcttctgggtcttgggaagatctttgatgctgaagaattaaacatcaagatcttgaagtgtctcataagaccttggcaaccaaagttgacaacaatcaaggaatcaaaagatctatccaagatgtccatggctgcactatttggtaagttacttgaatatgagcttgaaatgtttcaactaacttgtgctaaagatgcagaaaaggaaaataaaagtattccattaaaagctgcatcatcaaatgtaacaccccgtaggcctccgaagtgttatcatcaataataccagtttaatgttgaaaacatagtttataaaactcagcggaaacacagaatcgcttttcttgatacattatgtatgaaataacatcaactcatcaaagtcacacacacagcataaaaacacacccctgctgatccagtttctcgtaacataacccatgcagacagatatctatcagaattaggcagatatatcacttatacaacatgagaactcaggagaatatgtctcataaacatataagaaatagttctgtacaaatatatacatcagtactcacacctcatcgggtgatacaaaagaatatcagccctcacaggggtatacagaactatacaaatcatcaggagtacacacactccatcccttctcaagggtaccatatataaacaaaataatccaaaactgagcctacacgctccatctgctgccatcagccaaacagaaacgtctctactcgggcctcctgccctgagactgctctcttcgtccagaagagtcccttgaaaagcataatccccacacgggatgagataacaaatctcagtaagctcagggtccatggaggcttctcctccaccctggcccactttcataacacatacatcaggtaatcacaagcaaatggcccactggcctggccctctagccctcataacaacataagcacagcatacaaacatggcggagctgcctcaacgcctggcggagctacctcaacgcctatatcagtgggagtccggaactggcacctgtgccatcccattgggtgctaacccttcgcatggatgcacaacatatggtacctccgagaatagaaggagctacctcaacttctaatcccctgacctgtgggaatcaatcccctgggagctacctcaaccaagagccagccatgctaggaggaaaaccatctcctagggaggtccatatctatctattggccaacagatctatcacagcacaagtcaagcacaaatgcatacatatatcattatgagaatgcaactaccaatgcatgcatcatgaaatgaccaccactcccccggagtgtggtgtggcatacaagatgggaattcatccccaggaacactgaacttacctggtaaggtctcagtcagcaattccttcccaggtctgtggctcccgccacccaacgtctcagaatcaatgcctaaccaaggcatatgcaatttcatatcaaaaccagaccacagacatgaaattcacaatacacatatatatatatatatatatatacatcatacagaaatcccctatcctagggttcaagccaactcagcctacactaggctgctctaagaccactcaaggtccatcaggatggaatacaatccatctgagtcattctagactcgctgcacatatacataactaagccttactcagcctcacaattcaattattatcagaaaggggctgaggtccattcaaagccctgctctactagcctctcagctcagagcatcacaatcaaggctctagcctatcagagaaccatcaacaagtgactctacataagtcacacaggcatatacagagccaagattcaaagttatcagaatcaaaaactgaaagctaatccttcatctattctaagccctgaacaactttctcaactggaccctgagctaattctagtcccagctcatatgggtcactattcacagggacccccaaaatcaaaattaaatggtgaaaattgcgtttcttacctcagtggcgactccaacagccctagaacagcttctcctagcttctatgttccaattacgctgtggttctgcgccaagctcgagttctctgagctcttccctctgaggttcctcttctcactcaaattagggttttcaaggaatttgatgaaggattcaagctttctaatcggttcaatcaagattctaaggctcaggaaagtgtttaggctgagaaatcaagtcctaagaagctttaggacttcaacaatggaggttggctaaagggaggaagaagaaatggtttttccctccatttctaacgttttggcctttaaattctaatctgccgacgttcccacgcgactcacttgaactcccacgcgactcacttgggatggcagacagaaataccatttctaagccacttcccacgcgactcgcgtcgttttcccacgcgactcgcgccattcattcgggccttccacgcgacacgcgtggatcccaagtgactcgcgtggagccccagagaaaaccatgatttctggatcacttgccacgcgactcgcgtggatcttcaagtgactcgcgtgacatggcagagccatctgccccatattacccatatggcgcgggtcgcgccgcaccccaagtggttcgcgccatatgccagaacaatccataaacttgcattttaagcatctttcagaggattctaaagcatgatcatattccttaatccaaaaacttagattcatgcttaaactaagcttaaacatatgcttacgaattcaagctattacatttggcgccatcagcgccaatcctggcgccaccggcgccacaccctcagcagggtttcctgacctgaatccccgcgcgccgaaaataaaagtccttacatcaaagtctggaaaagtggaagattcaagtgaagaggatgaagaggacaacatgaacttgattgtcaaaaagttcatcaagttcttgtggaaaaacaagaacaaaaagttcacaaagaacaataagaacaacaacaacaacaacaataacaacaacaacaacaaaatgattgacaacaattttacttgttttgaatgtggaaaacctggccacatcaaataagaatgttcaatctttttgaaaaaacaacaaggtgaggaagaaaggaaaaaccaaaagagcctatatatcttgggaagataatgagtcaacaacttcaaaatcttcaactgaaaatgaagaagcaaacatgtgtctcacttccacaatcaatgaagaagatgatgatctatcaattgatggaaatgaggtaaattctgaacttgaacaagctattaatgctttccaagaaatgcatgaagaagcctaaaagcttgcaaaatccaataacaagctcaaaggaaatcttagatggcatgttgcaaagattactgaattgcaaacagaaatttgcaacttgaaagaagagaatgaaaaacctgtttcaagttacaaattaaatggatgtgtatgtgcttcttcttctactaatgttgacaaatacaatttgttgtaaaaggattttgatgattacaaaagaagtcaaggagaaaaatacacgttactcttatccaaaaatagtgatttaattgatcttttgagaaagctttacaaaggtaaatgcaacttggctgaaatgttaagtgtgcaaaaatatgttggagatacttctagtttggggtacaaacaaggttcaaaatcttttggaaaaactgtatttgtgcctcaaaaatagaagaatcaaaagaagttcaaaaactcaaagatcaatcaaaatgctttcttgagaaaatcatcaaaatctataacatgcaactattgtatggaaaaaggacatacttcttacaaatgctatgctaggagattttatgtgcctaatggagattgcatttgggttcaaaagaaaaagaaagctgctaacccctatggatctaatcccaattgggtaccttcctttaaaaattaatttgatttttgcaggtatgtctaagagctagatcctcatcatggtacctggatagtggatgctctaaacatatgacgggtgacatgtctatgcttacaaatctaactattaaagatgaaggatgtgtcacttatggagataataacaaaggaaagatcattggagaaggcaacataggagatggcttcaaaaccaaaatcataaatgttctttatatggaacagttgaagcataatcttttaagtataagccaactctgtgataaaggatttaaagtctcattcaataagaattgctgtatgatttgtgatgagcaaagtggtgaagtgattcacataggtaaaaggaaaggtaacatttatttactttcaattgatcatgcattctttcacaacacttcatgtctattaagcaagattgatgaatcttggctgtggcatagaagggcaagtcacattaacatgcatcatatgaaaaaactaattaaaaaggatttagtaattggtttacccaaactcaagtttgaaaaggacaacctatgtgatgcttgtcaaaagggaaaacaaaccaaaagttcttttcaaagtaaaaacattgtttccacctctagaccccttgaattacttcacattgactttttgtgtccttctagaactatgagtttacgaggcaattattatgggcttgtcattgtagatgattactctagatttacttggactctgtttttgaaatccaaaagtgatgctttccatgcttttagaaaaatggccaagcttgctcaaaatgaaaaaggtagcaaaattagctcaataagaagtgatcatggtggagaattccaaaatgaacattttgaaaaattctgtgaagaaaatggaattaaccacaatttttcagctccaagaacacctcaacaaaatggtgttgtggagaggaaaaacagatctgttagaattgatgaagaggttgaggaagatcatgaagaatcaagtcaagatattcttaagttttgattttacatgcccactcaaattgatgtcatatgtactttgtctaaaagcttggttcaagaaagatgaaatccctcattcctcacataagctgaataagtcatgcatacattagctcattaattcatgattaggtcacacacattccatgaatcatttggcatgacattaaagcattaaagttttcataaaaagtgtttttcactgttttaatcgattactggttgcacttaatcgattaattgcttgattacagaactacatataaagatatgaacactttaattgattaccaaattcttgtaatcgattatattcagctgactttgttaagtcgttctgtgttaatcgattacgtgacggattaatcgattatatgtccatctgcataattttcagaaaaaagtttatctggtttaatcgattaccagagtattgtaatcgattaaataagcattgatacatttttcacaatccctgtgttaatcgattatttgagtattaatcgattacttcagtgtttcaaaaaatccatattctctggaataatcgattacgacatgagttaattgattatttgttcttaagatttttttcagatttcacatgaacactttaatcgattattttggaactttaatcgattacatttgttaaaataattgattactcttatggaataatcgattacagtcagttaattctgttttttttataaatagatgcagctcattaagaggagagatttttagttttacgaagaaagccttgtaaacacattctctggagatttcagaagcaccaaggctctttagaaacattcattgataatggtttcaagaatcatgaagaatctcatgtgttgagtcatattttcatgattagttttggttaaagcttcatttgtcaaaaagaagtcatcaagaaagatcatggcattcattctcagtctggtttgatcatttaaactcattcatttcactgaggatgcacaggtgatatctttcttgaatcaatttcattgttgtattgtatagaaattgtttgttttgttggttagttgttgatataacaatttgtatctttaaagcattgctagataggtatctagtgggtagaacagagaggggatctctggttcttagatcttttgagaagtctataggtttagattttgaattttacctagggtgggtaaaagagatctgtgtttgcttgtaaagatagtcattttgttatagtggaaactctaatcaaggttgattagaagtaaaactggatgtagcctccggggttgagaggtgaagcagtataaatcttgtgtgtaattttaattttctgttcacattcatattgttcttgaagtattatttttgttaacatcacaagattgggttaagctcaagagtgggttgattgagataaaaaagttgatattaaaaagtttgatttcttaattggttaagatacgatccttctttcaaagtcttccgctatgtacaaaatttgttttaaattctaaaaactctgaggaaaaaccaattcacccccctcttggttatttgcataagtgttcattctattttcaagatctcttgaagaaggagctagaactcttcttaatgagacaaatttgccaaaaaaaatttgggctgatgctgtaagtacagtttgctacattttaaatagattacttataagacctattttaaagaaaactccttatgagctatacaaaggtagaaaaccaaacatttctcatttgagagcttttggctacaagtgttttgttttaaacaatgggaaataatcacttggaaaatttgatgctaaagctgatgaagcaattttccttggatattcattacatagtaaagcatataaagttttcaataaaagaaaaacgtgaatggaagaatttgtaatgtgatatgtgatgagtctaatccctcaaacaagggaaaccagtgtgatgtagatgcaggtcctatggaggaatttattcagcttaatgattccataagtaaagagaaagaagaaccaagtactgaaatgaaaccatcaacacctgttcaaaagccaaaagattggagaacaaccagagatctctcacttgataacatcataggtgaagtttcaaagagagtatctaatagatcttcttcaagaaatctatgttgtaatatggcttttgtttctcaaattgaacctaagaatattgatcaagccttaattgatgaacattggatgcatgccatgcatgatgagttaaatcaattcaagaaatgaagtttaggaacttgttcctagtgaaaataataggaatactcacaataaccaagagggggggtgaattggttaaaaccttggtattttaaaactcattcaaatcagagttcaggatctttatcactttgaaaaccaagaaatctttttactcaatcaaatgttgcagccccaagaattcaataggtcaaaaacagaacttgttggacaaagcaaatgaatcaagaatcaataaatatgataagaatagagatagaaaagcaacacacaagcaatatatactggttcacttcacaacttgaagctacatctagtttcttctaatcaacactagattagagtttcactattataaaattctattcttacatgcaattacaacatctccctttatcaaccctagataaagaatagaaatctaaaaccctattagaaatctaagagacaacgaaccagataacactactctgttctttacactaaagaacccttctctagatacaagcaagaacccactttacaatagcaaacttacacagaaattcagaaccaaatttacacacaaagattaaggagagagacaacctaatgatccaatgaatgttatgcacatgaattgccaaatcaggttgagtagcaaactagattagaacatgcttatccttaatcttgaaaagaatcttgctcaagaatcattcaaagacccattgatgttttgaatgaagcaagacgtaaaaacaatgtgaaaatcactttggaaagctgtaatatctgggatttttaaacatatgaggaagcatgtgttaagcttaggattaagcgtataatggaggaaatatattttaggccttggaatcccttgaaaggaggcttaaacgcttgagaaagagcggaaataggctattctggcctgcggcgcgacccgcgtgaagaacggcgcgacccgcgccagatgtacaaaaatgccaatgctgtctggcctcccgagtgggtagcgtgggattccaagtgagtagcgtgagaagtggcctagaaatggcattttctgtctgccatcccaagtgagtcgcgtgggagtccacgcgagtcgcgtgggagtccacgcgagtcgcgtgggagtccacgcgagtcacgtgggagtccacgcgagtagcgccataagtgctccagaaagtctgttttgcactggaacatggcgcgagtagcgtgggacatggtgcgagtagcgtgggaacgtcggcagaatctgtatttaaaggccatttacgagatttttggccaaaaagcttggcttcttcttcctctggactccagcagccatgggagagcttcccaagctctcatggccatgttttgggacccctaaacactccagaacccagtaatcttcctagaaaccgagtgagagcgagaatccttcctccctttcaccaaaacctccagtttctgaggaacctccagagaggtggatggaagctcgagtttagcgaggaacggtggtggttcagcggcaccaaggctagggagagtagcctagaggccttcctcatctgttctgaggtaagaaactcgagtttctccgattgattttggatttgggggttttgggtgaatagtgacccatctatgatagggctagaattagctctgggtccagttgagagaagtgtttagaatgatgtgaggaggaaggattagctttcaatttgtgatttggagactgttggttttggctctaggtgaggcatgtgtgacttggattgagtcacttgatctgagacatgccagagcctttgtgatgggcttgtggatgagtctgaaatgactctgaggccatggatgatctgggatagaccactgagggtctatggaaaggcttgtgatggatgagcctgatgaaccttagagtagatgctcaggttgatgggaaggactgtggttcctttcccggaggcagtggatgtctgcttgatgagcttgtgtatgtttatatgcttgaatggtctgtgatgtgtgcttgtatgccttggtagggcttgacacagagggtgtcagaggagcagaccatcagcggaggctagagctgtgaggtacggctagccaggtaagctcatctttctggagttttcccttattttggtttggcatccaagtagggtgaagattgcatgctatgtttgaatatatatatgtttatgcatgcaattgaaaggaaggcctaggtggcctgttattgatattctaggggtgggaagcctgaaaggctgaagaacggtacttagagtggaactcagtccgttctagaaagatgaatatatgatgaaccctaggatagccactgaaatagtgtgagggttatgagacacctgatgtggcaggtgtgaggccgtgagcctgttgagagaacacagatcatgagatggtctgtgatggaacctagaggatactggatgagtatcaggctagctgaggttccctagccagaggtagagtttgaggactccctggaatagctgagattccttgggaggtgccactgctctccacttaagtcctaaggccagatggaactgtgcggatgttcctccttaggcaaagatgttggaaatcctgagtggttatcctcaggcatgtgttatgaagtcctggacggctattcccaggcatgtgttatgatgtcctggacggctattcccaggcatgtgttatgtagtcctggacggctattcccaggcagtgattatgaaagtcctggagggctattcccaggccagtgttttagagagtcctggagggctattcccaggcaagtgatataggagatggctattcctcctattactagacactgatacaagagatggctattcctcctattctgtagtgtttagccacatgtatatgatatgctatgttagtacctctgtgagatatctgtgagacaggctatgagagcctagatgagatattgatgccatggttatggctatggtctctgatggatggctgtgagagccaaggtgaggtgaaatacctctgatgctgagagcattcggttatggacccagatggctgggatgtgtgaaagctaggattatgtcctaggctttgtaggtgtgagctaggatgatttcctcagctctgtttattttgtttgtgtatgcttggtggtgaaccagggttagggaggatccccagaaccctgagtttactgagacgtttgtctcaccctgtttggggttgtggttttcaggtgcttcttgaggaaaagaggcgacctcagggcaggatgccctagtggaccaaataggctggatgggaggctgcagtagaagaccagagcagagcttcaagagttggagctggtcttagatctctgtgagttgtagggtatgtatatacccattttcctgtacatattttgttatatgacccagttgaggtcttgctttgagcatgtatatgtacagataatgtggatgtatataagtgtgtttcctcctgaatatctctgtttagttttgtgtatctgcctatatagttgtttatgttttatctggatcagcaggggcgtgttttatgttctttgttatgtggtttttatattccatgcataatgtaatcaagataaacgattctatcgcttccgcaccgcgcttagttaacactgatagcatgttatgtatatcattgatgataacatgccggagacgtccggggtgttacatttaatggtatcagagcggtttcttggtagagacattatgtatggaatggtgcgttgcttgctgttgttggttgaattgacatgagaattgcatgtgggtacacgggatgtgagcctgatcaactcactgtttgtgtacatatgcaatgtcatgtcgagattcagaagcaacagtagggcgaccagtgccagtctgatccagtagtggtcgcaaggtggcggccatgcagcaagagttagctgtatataggcaggttcaggaggattgtgcagcggcagagacctgctgacacagagaggtatgaggccttgatgaaggctcatcaggagttaaaaggaggggtgacagagtatcccctacacctcctggttataaaggcgaaggaagtcaccatcaggttggtgggagccacctgttgggggacctgatgtcccatgtggttacacagagatagatatgcagccgagggcagatgcttattattttgtgagcatgaccctccaacctcccacagcagttatgatcttgtgcctcagcaaggtggctgtaggctgtgataagatctttgagatgatggtatgttggaccatcagaggttgctgtaggcgacctaggtactgcagggtgatgccatgagtggtggaagaccacagtggcgctgcagatgggccagaaagaggttcttacctgacagagatcagaaacaggcagagtttgacagtatagtcctgggagagacatgactgtggttgagaacttggcttagattgatgaaccagccaagtatgctcatgataggagatccaggcccgatgttgatatcctcgcagctaagttccagaggggacttagaggggatctagtggtatggtggccagcagtggatctcaggatatgaacagcttggtgaggctgtgtcgcctgagttgagtatagactcaacagatactgaggtaagcagttttcttactcggtgggacagagggtagagagacccagagatgctgacccagtggataagggtacaggctaggagctgagggtgttttgattacagctcagaagtgcctgatggtacctgaccgcagatgagtgctgcagaggccagagatacccagtgtgatgcttgtgggaagcctcactggggagtgggtcttataggtcagctgatgtgttttatatgtgacctatagagttactatgttgaatgtgtcctgaggaggacaatcacagagatagaatctccagaggtactagatgatgatgtcagaaggattctgaccagagttaagatatggttatatacctgagacatatacatgggtagatgtatatgttagttctccaggtgcgctggagagtaccacgcttcgaggaagcggtggatgttgagttggtttgagatggacctccctaggagaagggtttcctcctagttggttttctctggttgaggagctcccagagaattggttattgtacagaccaagaggatagaagttgaggagctccttctatacctcggaggtgccatagacgtgcgtccatgtgtaagggatagtttccgaggggacgacacgtatgttagttcagaacacacactggagtgtgggtcatgttttaggttgtattgattttatatgtatctgcattggatatatctgttggccaatagacagataccgacgttgaggagcttcgtcgtgtatctgggcgttgaggagctccgcctgtggcattgaggagctctgccacatcatgatattggccaatagatagataccggcgttgaggagctccgccgtgtatcaggggcgttgaggagctccgccctgtggcattgaggagctctgccacaccatgacaggtctgacgttgaggagctccgtcagtggcgttgaggagctccgccaggcattgaggagctctgccacctgtcatgtgatgatattatgttgttgattagatgaataccggcattgaggagctctgccgtgtattctgggcgttgaggagctctgccctgtggcattgaggagctctgccacaccatgacaggtctgacgttgaggagctccgtcagtggcgttgaggagctccgccaggcattgaggagctctgccacctgtcatgtgttgagacttatgataatatcagactgacgttgaggagctccgtcagagcgttgagtgatactccgctaggcattgaggagctctgccatatatctgatatcatactgacgttgagggttctccgtcagggcgttgagggatctctgccatgtgtattcgcgttgaggtagctccgcgaggcgttgaggtagctccgccatctgttgtgatcagcgttgaggtagctccgctgggcgttgaggtagctccgccatttgtttattattagcgtagaggtagctccgctaggcgttgaggcagctccgccatatgtagggagcaagatgtttgctcatgtgtttgatgggaccaggaggtccaggccagatggccggtgtgcttgagatacgtcctagcagagacatggacatgtgttatgatctcgagcaggttagcatgggagcgatccatgcatgtgaacagtctttgactgtgagctgagtgagcagcatcagaggtataggcctgtcgatgacaggggatcatctggtctctgattgagagggacccagttgatggtgatcagagtagcgcagcagagatctgcgaggcccagccacaggaggtggctgtgagggctatggtagaccagcaagatgtctcttggaaggcacctggcttaggatgagctaagcctgatgagggtgcatatagagagagagctggtagataccgtccttcagaggttacaaggactggttggatagtcatccaagggccactgtgatgtgttgtatcctgagaggatttcaggtggccagggatgagataagacatagctataggtatggctagtgtctgatatgtcacttggttagtgacagtgatccgaagttacctctgggtgtgaggtgttcttcggaaggtttggaacccagctgaggcttagtgtagcctatcatcctcagatagatgatcagatggagcgagccatctagatcctggaggatgtattgcgtgagcgtaccttggagcagggtacaggctgggttagtgatctgcctatgatggagttccttgattgtgatggttcacatgctagaggaacatggcacctgaaaaggctttgtggaagccaagggtgcaggactccagttgatctggcagaggtaagaggaaaagaacagctttatgaacccaagatggttcgagagactcttgagcagatccggaggatcagagttatgtttgaaagctcaaagtcagtgaaaagtatatatgatcctgacacctaccctgagagttggtaagggtaatcagaggtgtctgaggcggtctttggttataggtgtaggatgggccttgagggagaagagattgcctcccagttaccttgatggcataagagttgccatgtgttccagatgatgatgtaatggagacatcacgtgtggaagcccgacagtgatcagatttaagagaatctgatagatcctacacaacctatgaggacatgtggcacctgagtaggaccagatttagccgaatggaattctgaggacagaattctaaaaaggaggggtgtaatgtaatatctgggatttttaaacatatgaggaagcatgtgttaagcttaggattaagcgtataatggaggaaatatattttaggccttggaatcccttgaaaggaggcttaaacgcttgagaaagagcggaaataggctattctggcctgcggcgcgacccgcgtgaagaacggcgcgacccgcgccagatgtacaaaaatgccaatgctgtctggcctcccgagtgggtagcgtgggattccaagtgagtagcgtgagaagtggcctagaaatggcattttctgtctgccatcccaagtgagtcgcgtgggagtccacgcgagtcgcgtgggagtccacgcgagtcacgtgggagtccacgcgagtagcgccataagtgctccagaaagtctgttttgcactggaacatggcgcgagtagcgtgggacatggcgcgagtagcgtgggaacgtcggcagaatctgtatttaaaggccatttacgagatttttggccaaaaagcttggcttcttcttcctctggactccagcagccatgggagagcttcccaagctctcatggccatgttttgggacccctaaacactccagaacccagtaatcttcctagaaaccgagtgagagcgagaatccttcctccctttcaccaaaacctccagtttctgaggaacctccagagaggtggatggaagctcgagtttagcgaggaacggtggtggttcagcggcaccaaggctagggagagtagcctagaggccttcctcatctgttctgaggtaagaaactcgagtttctccgattgattttggatttgggggttttgggtgaatagtgacccatctatgatagggctagaattagctctgggtccagttgagagaagtgtttagaatgatgtgaggaggaaggattagctttcaatttgtgatttggagactgttggttttggctctaggtgaggcatgtgtgacttggattgagtcacttgatctgagacatgccagagcctttgtgatgggcttgtggatgagtctgaaatgactctgaggccatggatgatctgggatagaccactgagggtctatggaaaggcttgtgatggatgagcctgatgaaccttagagtagatgctcaggttgatgggaaggactgtggttcctttcccggaggcagtggatgtctgcttgatgagcttgtgtatgtttatatgcttgaatggtctgtgatgtgtgcttgtatgccttggtagggcttgacacagagggtgtcagaggagcagaccatcagcggaggctagagctgtgaggtacggctagccaggtaagctcatctttctggagttttcccttattttggtttggcatccaagtagggtgaagattgcatgctatgtttgaatatatatatgtttatgcatgcaattgaaaggaaggcctaggtggcctgttattgatattctaggggtgggaagcctgaaaggctgaagaacggtacttagagtggaactcagtccgttctagaaagatgaatatatgatgaaccctaggatagccactgaaatagtgtgagggttatgagacacctgatgtggcaggtgtgaggccgtgagcctgttgagagaacacagatcatgagatggtctgtgatggaacctagaggatactggatgagtatcaggctagctgaggttccctagccagaggtagagtttgaggactccctggaatagctgagattccttgggaggtgccactgctctccacttaagtcctaaggccagatggaactgtgcggatgttcctccttaggcaaagatgttggaaatcctgagtggttatcctcaggcatgtgttatgaagtcctggacggctattcccaggcatgtgttatgatgtcctggacggctattcccaggcatgtgttatgtagtcctggacggctattcccaggcagtgattatgaaagtcctggagggctattcccaggccagtgttttagagagtcctggagggctattcccaggcaagtgatataggagatggctattcctcctattactagacactgatacaagagatggctattcctcctattctgtagtgtttagccacatgtatatgatatgctatgttagtacctctgtgagatatctgtgagacaggctatgagagcctagatgagatattgatgccatggttatggctatggtctctgatggatggctgtgagagccaaggtgaggtgaaatacctctgatgctgagagcattcggttatggacccagatggctgggatgtgtgaaagctaggattatgtcctaggctttgtaggtgtgagctaggatgatttcctcagctctgtttattttgtttgtgtatgcttggtggtgaaccagggttagggaggatccccagaaccctgagtttactgagacgtttgtctcaccctgtttggggttgtggttttcaggtgcttcttgaggaaaagaggcgacctcagggcaggatgccctagtggaccaaataggctggatgggaggctgcagtagaagaccagagcagagcttcaagagttggagctggtcttagatctctgtgagttgtagggtatgtatatacccattttcctgtacatattttgttatatgacccagttgaggtcttgctttgagcatgtatatgtacagataatgtggatgtatataagtgtgtttcctcctgaatatctctgtttagttttgtgtatctgcctatatagttgtttatgttttatctggatcagcaggggcgtgttttatgttctttgttatgtggtttttatattccatgcataatgtaatcaagataaacgattctatcgcttccgcaccgcgcttagttaacactgatagcatgttatgtatatcattgatgataacatgccggagacgtccggggtgttacatttaatggtatcagagcggtttcttggtagagacattatgtatggaatggtgcgttgcttgctgttgttggttgaattgacatgagaattgcatgtgggtacacgggatgtgagcctgatcaactcactgtttgtgtacatatgcaatgtcatgtcgagattcagaagcaacagtagggcgaccagtgccagtctgatccagtagtggtcgcaaggtggcggccatgcagcaagagttagctgtatataggcaggttcaggaggattgtgcagcggcagagacctgctgacacagagaggtatgaggccttgatgaaggctcatcaggagttaaaaggaggggtgacagagtatcccctacacctcctggttataaaggcgaaggaagtcaccatcaggttggtgggagccacctgttgggggacctgatgtcccatgtggttacacagagatagatatgcagccgagggcagatgcttattattttgtgagcatgaccctccaacctcccacagcagttatgatcttgtgcctcagcaaggtggctgtaggctgtgataagatctttgagatgatggtatgttggaccatcagaggttgctgtaggcgacctaggtactgcagggtgatgccatgagtggtggaagaccacagtggcgctgcagatgggccagaaagaggttcttacctgacagagatcagaaacaggcagagtttgacagtatagtcctgggagagacatgactgtggttgagaacttggcttagattgatgaaccagccaagtatgctcatgataggagatccaggcccgatgttgatatcctcgcagctaagttccagaggggacttagaggggatctagtggtatggtggccagcagtggatctcaggatatgaacagcttggtgaggctgtgtcgcctgagttgagtatagactcaacagatactgaggtaagcagttttcttactcggtgggacagagggtagagagacccagagatgctgacccagtggataagggtacaggctaggagctgagggtgttttgattacagctcagaagtgcctgatggtacctgaccgcagatgagtgctgcagaggccagagatacccagtgtgatgcttgtgggaagcctcactggggagtgggtcttataggtcagctgatgtgttttatatgtgacctatagagttactatgttgaatgtgtcctgaggaggacaatcacagagatagaatctccagaggtactagatgatgatgtcagaaggattctgaccagagttaagatatggttatatacctgagacatatacatgggtagatgtatatgttagttctccaggtgcgctggagagtaccacgcttcgaggaagcggtggatgttgagttggtttgagatggacctccctaggagaagggtttcctcctagttggttttctctggttgaggagctcccagagaattggttattgtacagaccaagaggatagaagttgaggagctccttctatacctcggaggtgccatagacgtgcgtccatgtgtaagggatagtttccgaggggacgacacgtatgttagttcagaacacacactggagtgtgggtcatgttttaggttgtattgattttatatgtatctgcattggatatatctgttggccaatagacagataccgacgttgaggagcttcgtcgtgtatctgggcgttgaggagctccgcctgtggcattgaggagctctgccacatcatgatattggccaatagatagataccggcgttgaggagctccgccgtgtatcaggggcgttgaggagctccgccctgtggcattgaggagctctgccacaccatgacaggtctgacgttgaggagctccgtcagtggcgttgaggagctccgccaggcattgaggagctctgccacctgtcatgtgatgatattatgttgttgattagatgaataccggcattgaggagctctgccgtgtattctgggcgttgaggagctctgccctgtggcattgaggagctctgccacaccatgacaggtctgacgttgaggagctccgtcagtggcgttgaggagctccgccaggcattgaggagctctgccacctgtcatgtgttgagacttatgataatatcagactgacgttgaggagctccgtcagagcgttgagtgatactccgctaggcattgaggagctctgccatatatctgatatcatactgacgttgagggttctccgtcagggcgttgagggatctctgccatgtgtattcgcgttgaggtagctccgcgaggcgttgaggtagctccgccatctgttgtgatcagcgttgaggtagctccgctgggcgttgaggtagctccgccatttgtttattattagcgtagaggtagctccgctaggcgttgaggcagctccgccatatgtagggagcaagatgtttgctcatgtgtttgatgggaccaggaggtccaggccagatggccggtgtgcttgagatacgtcctagcagagacatggacatgtgttatgatctcgagcaggttagcatgggagcgatccatgcatgtgaacagtctttgactgtgagctgagtgagcagcatcagaggtataggcctgtcgatgacaggggatcatctggtctctgattgagagggacccagttgatggtgatcagagtagcgcagcagagatctgcgaggcccagccacaggaggtggctgtgagggctatggtagaccagcaagatgtctcttggaaggcacctggcttaggatgagctaagcctgatgagggtgcatatagagagagagctggtagataccgtccttcagaggttacaaggactggttggatagtcatccaagggccactgtgatgtgttgtatcctgagaggatttcaggtggccagggatgagataagacatagctataggtatggctagtgtctgatatgtcacttggttagtgacagtgatccgaagttacctctgggtgtgaggtgttcttcggaaggtttggaacccagctgaggcttagtgtagcctatcatcctcagatagatgatcagatggagcgagccatctagatcctggaggatgtattgcgtgagcgtaccttggagcagggtacaggctgggttagtgatctgcctatgatggagttccttgattgtgatggttcacatgctagaggaacatggcacctgaaaaggctttgtggaagccaagggtgcaggactccagttgatctggcagaggtaagaggaaaagaacagctttatgaacccaagatggttcgagagactcttgagcagatccggaggatcagagttatgtttgaaagctcaaagtcagtgaaaagtatatatgatcctgacacctaccctgagagttggtaagggtaatcagaggtgtctgaggcggtctttggttataggtgtaggatgggccttgagggagaagagattgcctcccagttaccttgatggcataagagttgccatgtgttccagatgatgatgtaatggagacatcacgtgtggaagcccgacagtgatcagatttaagagaatctgatagatcctacacaacctatgaggacatgtggcacctgagtaggaccagatttagccgaatggaattctgaggacagaattctaaaaaggaggggtgtaatgtaatatctgggatttttaaacatatgaggaagcatgtgttaagcttaggattaagcgtataatggaggaaatatattttaggccttggaatcccttgaaaggaggcttaaacgcttgagaaagagcggaaataggctattctggcctgcggcgcgacccgcgtgaagaacggcgcgacccgcgccagatgtacaaaaatgccaatgctgtctggcctcccgagtgggtagcgtgggattccaagtgagtagcgtgagaagtggcctagaaatggcattttctgtctgccatcccaagtgagtcgcgtgggagtccacgcgagtcgcgtgggagtccacgcgagtcacgtgggagtccacgcgagtagcgccataagtgctccagaaagtctgttttgcactggaacatggcgcgagtagcgtgggacatggcgcgagtagcgtgggaacgtcggcagaatctgtatttaaaggccatttacgagatttttggccaaaaagcttggcttcttcttcctctggactccagcagccatgggagagcttcccaagctctcatggccatgttttgggacccctaaacactccagaacccagtaatcttcctagaaaccgagtgagagcgagaatccttcctccctttcaccaaaacctccagtttctgaggaacctccagagaggtggatggaagctcgagtttagcgaggaacggtggtggttcagcggcaccaaggctagggagagtagcctagaggccttcctcatctgttctgaggtaagaaactcgagtttctccgattgattttggatttgggggttttgggtgaatagtgacccatctatgatagggctagaattagctctgggtccagttgagagaagtgtttagaatgatgtgaggaggaaggattagctttcaatttgtgatttggagactgttggttttggctctaggtgaggcatgtgtgacttggattgagtcacttgatctgagacatgccagagcctttgtgatgggcttgtggatgagtctgaaatgactctgaggccatggatgatctgggatagaccactgagggtctatggaaaggcttgtgatggatgagcctgatgaaccttagagtagatgctcaggttgatgggaaggactgtggttcctttcccggaggcagtggatgtctgcttgatgagcttgtgtatgtttatatgcttgaatggtctgtgatgtgtgcttgtatgccttggtagggcttgacacagagggtgtcagaggagcagaccatcagcggaggctagagctgtgaggtacggctagccaggtaagctcatctttctggagttttcccttattttggtttggcatccaagtagggtgaagattgcatgctatgtttgaatatatatatgtttatgcatgcaattgaaaggaaggcctaggtggcctgttattgatattctaggggtgggaagcctgaaaggctgaagaacggtacttagagtggaactcagtccgttctagaaagatgaatatatgatgaaccctaggatagccactgaaatagtgtgagggttatgagacacctgatgtggcaggtgtgaggccgtgagcctgttgagagaacacagatcatgagatggtctgtgatggaacctagaggatactggatgagtatcaggctagctgaggttccctagccagaggtagagtttgaggactccctggaatagctgagattccttgggaggtgccactgctctccacttaagtcctaaggccagatggaactgtgcggatgttcctccttaggcaaagatgttggaaatcctgagtggttatcctcaggcatgtgttatgaagtcctggacggctattcccaggcatgtgttatgatgtcctggacggctattcccaggcatgtgttatgtagtcctggacggctattcccaggcagtgattatgaaagtcctggagggctattcccaggccagtgttttagagagtcctggagggctattcccaggcaagtgatataggagatggctattcctcctattactagacactgatacaagagatggctattcctcctattctgtagtgtttagccacatgtatatgatatgctatgttagtacctctgtgagatatctgtgagacaggctatgagagcctagatgagatattgatgccatggttatggctatggtctctgatggatggctgtgagagccaaggtgaggtgaaatacctctgatgctgagagcattcggttatggacccagatggctgggatgtgtgaaagctaggattatgtcctaggctttgtaggtgtgagctaggatgatttcctcagctctgtttattttgtttgtgtatgcttggtggtgaaccagggttagggaggatccccagaaccctgagtttactgagacgtttgtctcaccctgtttggggttgtggttttcaggtgcttcttgaggaaaagaggcgacctcagggcaggatgccctagtggaccaaataggctggatgggaggctgcagtagaagaccagagcagagcttcaagagttggagctggtcttagatctctgtgagttgtagggtatgtatatacccattttcctgtacatattttgttatatgacccagttgaggtcttgctttgagcatgtatatgtacagataatgtggatgtatataagtgtgtttcctcctgaatatctctgtttagttttgtgtatctgcctatatagttgtttatgttttatctggatcagcaggggcgtgttttatgttctttgttatgtggtttttatattccatgcataatgtaatcaagataaacgattctatcgcttccgcaccgcgcttagttaacactgatagcatgttatgtatatcattgatgataacatgccggagacgtccggggtgttacaaaagcttagaaggtttgtgtatactcagaaatacaaatggtcaagttgtaaaacaagctaagccttcaatcctatttataacagaatttgtaattaactgtaatcgattaaacgcgcctgataattgattaattcgcttatgtaatcgattaaaataaccatgtaatcgattaaaccgttcaagaatgtttctgggtttcaacaacgagcaaaataatcgattatcctgatctgtaatcgattaagacaaaagtctcaggataacacaatgcactatgtaattgattacaagatttggtaatcgattaaagcagaagacttatatttccaaaatgaacgtgtaatcgattacaagctttggtaatcgattaagacaggaaagtgacttttctcaaatagcctaagtaatcgattacagataatggtaattcactatcacaacaaagcttaaaattcatgattaactatgtaatcggttacaacacttaagtaatcgattaaaatcattaacaaagcagttttcttgtaaacaaaggccaaataatcaattattccgatgggtaatcgattacaatgttcataaaagattttccagatgaacgaagaacaaaataatcgattatatcagtaaggtaatcgattaaaccaatgaaaataacatttttccaaaaaccttaaccaaattataaaagctttgttattttttatgaaaaccatttaggtttatgaatgaatgaatgaatgcaaagcatggatcatcaaattagcctttctcttacacttgaatcaattacaacttcaaggcatccaagcatgttgaaagctcaaaaccaatcttgaatcaaagtcttccattcttcatgatactccccctatatccaacacctagaccatcctctctcaaacgtattggcacaaaatgagtttttagaaataaacttgatgagagtggaatcatagtaaaaaataaagctagattggttgcaaaaggttacaaccaagaagaagacattgattatgaggaaacctatgctccagttgcaagattagaagccgttaggttattgcttgcatatgcatgtttaatggattttatactttttcaaatggatgttaaaagtgcatttttaaatggatacattgaggaggatatatatgttgaacaaccttctgattttactgattttaaacatccaaactatgtttttaaacttaaaaaggccctttccggtttaaaacaagctcctagatcttggtatgaaagattaagcaaatttttgcttgaacaatctttcacaagaggtcatgttgacaaaaccctgttcatcaaaaggcataagaatgatatcttattggttcaagtatatgttgatgatataattttaggttcaactaaccatttgttgtgcaaggaattttctatagcaatgcagaaagaatttgaaatgccaatgatgggagaattaacattctttcttggacttcaagtgaagcaaatgaagaatgagacatttctcaactaatccaagtattgccttgaagtgatcaaaaagtttgaaatggagaaatgtaaagatgttgcaactccaatggcaacatcaacctatcttgattcagatgaaaatggaaagagggttgatgagtcaaaatttagaggaacgattggatcattattgtatttgacagctagtagaccagacataatgctaagtgtgatatcaagcaaatcccaaagagtcacacctaacagcagttaaaaggatcctcaaatatctcaaggcaacaccaaaagttggtctttggtatcctaaaggtgcatcaattaatattattggttattctgattctgactttgcaggatgtaagttagatagaaaaagcactagtgaaacttgtcatctacttggaagttcattaatctcatggcattgcaagaaacaatcttgtgttgctttgtcaactgctgaagctgaatatatctcagctagaagttgttgtgcacaaaggttatggttgaagcaacaattacaagattttggagttgaattgaaagaaatacctttgctatgtgacaacacaagtgctataaacatttcaaagaatccaataatgcattcaaggaccaagcatattgagataaaacatcattttctcagagattatgttcagaaaggtaatatcaaaattgatttcattgacactcataatcaattggttgattatttactaaaccattggctagagatagattctatgctcttagaaacatgctaggaatcttggatgaatctaatctctgttagcttgaattttgtatgccttttcatgtgaaatgatttgtcatttgaatccatcatcacaaaagcttaaaattttcaagttgtgctgcataaattctgttttatctgatatttgttctgtaataatcgattaagtatcatattaatagattaaagtcacttaaatcatgatttagaatgaaatttgagcttatgtaatcgattacataaatgaaataatcgattattcttctaagaaacacatttcttagaaaattgaatcttttctgtgttaatcgattacactgatcaaaaatccttttacaaagtaaaaattcactgaaataatcgattacagtgaatggtaatcaattaaattactaaaaatcagttttttaaatttcaaaacctcctgcaataatcaattacatgtcgaattaatcgattacacaagcctcaacatgtttctgaaattcaatcttttctgtgttaatcgattaaatcataaaataatttattacactctgtcttctacacgtgaattttacaaaaataatcgattacgttacaaattaatcgattactgtatctgcagaaagtgattttgcttacgaattaatcgattacgcaaggaaataatcgattattcatggagtttctgcaaaatctaacagattttcttggaggttgtaactgcccaactcccacctaattcaaatttgaatcctctgcagtgatttaattcatactaactacttcttaattcaaaattcaaatacttggagcctaaaatctctataaatatagcctattgttgaaggaagaaatcacacctactctctttcttatctttcaaacacctctgtgtttttcttctgtctgagtttagtaactctgcccaaaagatgtctacctctaagagagttaagacttctataggaaaggttggagaaacctctaaccctgcagttattaggttggatcattggttccctgctgaaagggataaaatgacatatctccaattcaatgccaccaaactggtttgtcctcccaaacacctagagttagattggttcattagggaaggcttccaattccctgcttttcttgaaactcagggattgagaaaatttgtggagatgaagggtatgttctagcctgaattggtaaaggtgttttacacctgtgccaaaggttccatggatgggatacttaggtcccaagtgaatggggttgccatggaaataactccagaagtatgggaagctgtcgctggtatttcttttgaaggagaaatgatgtttgaggaagaggttgaggggtataataaggtataaacctataggggaatgctgattgatccccaaatgaggctaaagcttaggcttagcactggccccatgacccatgaagacagacttcttcattatataattacttacattctcactcctagagccacaaaccatgcccaagccactgatgatgacgcgtttaatcgattacagttagttacaaaatctgttataaataagtttgaaggcttggcttgttttctaacttgaccacttcgtatttctgagtatacacaagccttctaagtctttcaaagtgattttccgagctctattacttcttgcttcattctaaacattcataggtctttgaatgattcttgagtaagaaatttttcaaggttaagtaaaagcatgttctgattttgtttgttattcaacctgacttggtaactcatgtgcattacattcattggtgttggatatagggggagcatcatgaagaatgaaagactttgattcagaaatgtgttttgagctttcaacatgtttcaagtgccttgaagttttgtaaatgattcaagtgtaagagaaaggcaatctaattgatccttgcattgcattcattcatccattaactagcttaaatgatttttattaagacatcaaagcttttatctttttggttaaggtttgaatctgattaaaaggtttttggaaaaatgttttcgtactatcttaatcgattacttaatgatataattgattattttgttctttgttcattttggaaaaacctttatgaacaacttaatcgattacctatcgatttaatcggttatttgtcctttgattgaaaataaattgctttgttaaatgttttaatcttacttagtgtaatcgattacatagttaaaaatatattttgaaccttgctgtgataatcgattacccttatcaataatcgattacatagttcatttggtaaaagcttactttatgagttaatcgattaccaaaactcgtaatcgattacacaattcattttgtgaaatagtgctttctgtcttaatcgattacagctcggtttaatcaattattttgctcgttctgaaacccagaaaacttctttaacattttaatcgattaagtgataatttaatcgattacatcagagttttaatcgattattaggtgcgtttaatcgattacagttagttacaaaatctgttataaataagattgaaggcttgacttgtttaagaacttgaccacttcgtatttttgagtatacacaagccttctaagcctttcaaagtgattttcttagtgttattacttcttgcttcattcaaaatatcaatgggtctttgaatgattcttgagaaagaatcttttcaaggttaaggaaaagcatggtctaattttgtttgctattaaacctgacttggtaattcatgtgcattacattcattggatcatcagcttgtctctctccttaatttttgtatgtaaatttgtttttgaatttctgttgtaattgactattgtaagtgggttcttcttgcttggttctagataaaggttctctagctaaagaatagagtagtgttctctggttcttgctccttagaattctaatagggttttagatttctattctttatctagtgttgataaagggagggtcttgtaaaagcttgtaagaacaaaaatttataatagtggaactctaatctagtgttgactagaagaaactggatgtagcttctgttgtgaagtgaaccagcataaattgcttgtgtttttgtttttctatctctattacttatcttgttcattgattctttgattcatatccattttccaacaagttctgttttgaactattgatttcttggggttgagttatttgattgagtaaaaaaatttcttggttttgaaagtgataaagatcctaaactctgatttgaattaattttaaaataccaaggttttaaccaattcacccctcttggttattatgagtattcctattattttcactgttgtccaagcagtttatcagaccgagtgtttctccatggggagcaccagtgatcttcgtgaagaagaaggatggcaatatgaggttatgtgttgattacaagcagctgaataaggttactatcaagaataagtatcctttgcctcgaattgatgatctgttagatcaattgaggggagccaatgtgttctctaagatcaacctgagatctgggtatcaccagattcggatcaacctcgcagacataccgaagacaaccttccggtctcggtatggtcactatgagtatcaggtcattccctttggtctgacgaatgcccctacagtgtttatggaatatatgaatagggtattcagacctttcttagatcagttcgtgttggtgtttattgatgacatactgatctactccaggacggagacggagcatgccgagcatctcaggatttttcttcagacgttgaggaaggataagttgtatgccaagttggcaaagtacgagttttggctatcagaggtgaaattccttggccatgtgattcttgcagttggggtattagttgatcccagtaagatagagattgtgatgacttgggagaaacccaaggacatatttgagatccaaagtttccttagattggcaggctactaccggaggtttattcaggggttctcacagttggtgttacctttgactcgcctcacccagaagtgggttccatttgtttggactcatgagtgcgaatagtgtttttaggagttgaaggagaggttgacttcagctccagtgttgacgcttcctgatcccgagggaagctttaaggtgttgatgtgttgtaaacacatcctagttttaggctagttttaggttatattttagttaaataattaggaaaatagtttagaattagttaagtttattactttattgtttttaattcaattcaataccaattgatcattttcaggccaaaagaggagttcaaggcaaagaaaaagaagaaaacaaagttttaagtcccgcgcagatagcgccagaagccgcgtggatcgtgccaagtgcaggattgaaggtcatagtctcgaagatctcacacgatcaacgtgagaagccactcgattagcgtggattagccacaagcactgcgccatcagcgccaaggacaacaagccagggcattcaactcgaacaactcacgccagtagcgccatatccatgcgatcagcgccatctattcgagagcttcgcgccatcagcgctgtagccgcgctaacagcgccacaaaagaccagagcaagccaattgactcgaacactccacgcggttagcgtggagtgtcacgcaatcagcgccagactttctaacaagccgcgaaattagcgcgggatcgcgcgcgggtcgcgccagagtgatttagtttccttatttaaaagatctgtttcgaatttctgcatagaattaggctttcttactgtaattaaatggttctataaatataaagcccctgaaacaggttagggcatccataatagccagaatatacatttttcatccattcttcatcatctaaaaccctagaaatcaagaatcaagctgagtgtttgcacaacaatgaatcatactactgctttgatgttcttgaggcctatggctggctaaaccttgtattgtgggaaggcaatgaaccgatgataactcctctgtagtttgactggtattgaatgatatgttttaattgttttattctattctgcacttctttctattcttatttgaaattgatcacttcaattaagtacatagggttaggattcgcaatgggaacgttggggttctaatttctgaaccgtttagaataacagttgttcatcacctaggaatagggatgcgtggctgcagagcctatgatatgttcttttgaatgcttgaactgatagatttcattaaggaattaggttttccattcaggttaaagggttaattcactaaggaattagggattagctaatctaggaaagacttattctctgaacaattaataacaggaacctcttatgatctattctctaaatgcttagtttgacagaatcactaaaggcttaggattctcgatcgaattaaagggtgaaatcgctagttatctaggatttacgaatctaggagagatttatcatttgtgtatgttaatgttaaataaccagtcaagtgaaagagtaggaatctaaggggattgcgcttgaccacaattatccttccattgataacttcccaaatttatttactgcatttacttaatttctgtttttgcactcaaataaccaatcaatcaaacatttctttcgtaattttctgttttaatttcaatcacattcgttagtattattgtggaattaccccaatccctgtggagaacgatactcacttacctaactttattacttgaaaacgatcggtgcacttgccgttgcgcgtgaattgaacaacaggtgtactgtgatgcttccaagcgggggcttggatgtgtactgatgcaggaaaagaaggttgttgcctatgcttccaagcaattgaagcctcacgaggaggcttatcctacgaacgatttagagcttgcagttattgtctttgctctaaagatttggaggcactacctgtatggtgtcgagttggtggtgtttaataaccacaagagtctcaagtatctctttgattagaaggagttgaatatgagacagagacaatggatgaagttcctcaaagattatgactttgagttgagatatcatcccggcaaggcgaatgttgttgctaatgccttgagcaggaagtatgtgagtgttgcctgcatgatgatcttagactatgagctgattaagcagtttaaagatatgcacttgactgtgacagagggtgctcatggtcttgagttgagagagaccaaggttgataatgatttgataaggaggatccgagaggcccagaagcaggatgatgctgtaagggccatgattggtcagtaggatgtttcttgggagacttacgacttgctattgtaccaagattgagttgtggtgcctacgggtgagttggtggatgcaattctgtctgaggctcataagggcctgtgtagcattcatccaggtgccaccaagatgtatcaggaccttaagatgaacttttggtggccagggatgaagagagacatagctaaacatgtggctaagtgtctggtatgttagaatgtgaaaattgagcatcagagaccgtcaggtctattgcagtgtttacagattccagaatggaaatgggatagcatttccatggactttgtagttgggctaccgaggactcagactggatgtgactccatttgggtgattgtcgattggttgaccaagttcgcttagttcttacctattcggactgactataccaccgagaggttagctcagttatatgtcagagagattgtcagactgcatggtgtctcagagagcattgtcagtgatagagatacaaagttcacctctaggttttggggtgctcttcaggaggcttttgggacccagttgaggcttagcactgcctaccacccacacaccaatggttagacagagaggactattcaaactctgggttcttgctatgtacaccaagcctcaggtcggggtcacaatgactatccattagaattatggcttggcagagtgagctcatacatgttgagagcttatacattgaagcagggaactaggtggggtagatacctaccactggtggagttctcatataataacagtttccatgctagtttgggcatggcactctacgagacattgtatggtcggaggtgcaagactcctacttgttggactgaggtagaggagagacagcttcttggacctgagatggtttaggacacttcttagcagatccacatgattagagataagttgttgctggcttagagtcggcagaagagctattacgatagcaagcacctcccattgctgtttgatgagggcgatcatgtgtccctgaggttatctccaatcataggtgcagcagtagaagttgctgagaaattgaacattgcagatcaagataacacagcagaaattattgaacctaagctaaaggtgctatagaaaaaggaagatgataatccaactggaacaccaaaggtaatgctgaaaaagatttcagaaaaggctttggaaaaacctaataagaaaggtgtcaaaaagttggaggcaaagaagatcaagaaatggcgcaacaaagaaattgagctaggacaaagagtgatgctatcaaaatatcgcctgaagtttccaggtaagtcagaattcttttggtctggtcctttcttggtgcaaaaggtttgctcttatggaataatagaactcaattctttggacaaggacaaacctttcaaagttaaaaaatgccggttgaagcctcaccttgatgaccaagtggatgggaacacaaatttctattccacttaaatccactaatgattaaacagcaagatgcgtctagctttagacgttaaacgagcacacttttaatgtacatacacgcttttaatttctgtttttaaatttgatagcagtagatttataattcatgcatgtttaatttctaggcatttaagttcatgcattattagtaggtaaataaaacaaaaagcaaataaaaagagaaaaaggcggttcaagaatgtggcgctgatcgcgccaactatggcgctactggcgccacagctacggctattccacgccaacagtgtggcaatccgcgcggatcgcgccaaccattcgaccctgagcctcccatctgcatgatctggcgcgactcgcaccaagtgtggcgctatccacgccaatgacacggtcatttcacgctagtcgcgtgaccagtggcgccaactgcgccaagttttcgagactgaagcccttccagtgcctactggcgcggatcgagccaattgccgcgctgatcgctcgggactttggaaactgtttttaaattgaaattaattgggttctggaagtaggattttgaacaaagcctgaacatgtaaggacccaaatatgggaatcattaaggctaacctcgtgatgtgaatcaaattagttctgatccttgtttatgctttacaatgaaattttaaattggcaagaaaattaaatgcttcagttgtgaattgcttgaactaatagttatctggacaagagattaaaccacaggttaagtactgttaatgctttgattgtggtaaactgaagatggacatgagttactattacttgtatttatatctgtttgttgaaatatgtccatgctaactagaattagatgatttaggaacattcactgagctaaatctgggaattcagatggtgctactcaattctctatcatattgtgcactagtcaaccgatgaattgaattgttcttcgcataatatggttgcattatatctgacttaacatatttaatgaatcaaatctgggaattgttaagaccatcttctgcttgcaactaaacccaatggatagctgactgtgcctgttattgtgaatataaattgaccacttgctgttgctatcttgttagtgttgagcgaaatatatgggtttcctgaaccaagattttaatttaaactgttttgaagggcataaagaacactggttgcccaatgagaacactgatattactgcactgtttaaattgttctcattgtcttaaatctaggaatccacagtggcaagccatgcataattgctaactactctcagatacttattggtttgtgtagttaaattataggtgtctgagacctgttttggggtgtattagaacttattgttaaactgcaacttgtgaccccaagtaaacaacaaacagcttgtaaattggaacaatggtaaggaataaatctgggaattcagcccattgagtcaggtatatgtctggaaattttctgcaggtcagggtgaagaagttgagaaaggcagcaagcaaattgttcctgcatcctgcagcaaatgacaacagggaccttctaattttagtttctgtttttaattttcagtgttttatatcacttaggttagctgttttattactttattgtttttaaataaattatgtttggattgatgttcattctggtgtgattctcaaataatgcatacatgattgaatatttagcagcacataacccttttcatgtattgctgaggacaacaattttctaaatctgggaatgggtgcatatgcattatttgaggaatcatattcaagaaaacaaaggatgtccaacagaaaatttttgttttagttattagtttaaatttttagctgaataattcaataagttggcaacacatcagatttttcagattaaaaagtgaatggacacagtaatggataggatttctttgataaaagcttgtgtgaaatgaagcatagcatgaactgcatgatacatgattggaattgtgattgttggtatgtgatatgcatgttgaagttgaaatgttgcttgaaatgaagtcagcagtgattgacttgggtttgagcacctgtgagattttgagccaaacagtaattattcttttctctgagagactccattttcatagtattctagaacttgaattgtttctctggatgcaggtgtgaattgacatgattaaggcaatttcttcttctgaaaaccagggccaaaattgacttaccttcaattatttttccatttgtaccttatttgagcctgagctttttatttcaaatcacccaaatcagagccatatccattgaccaaactccttgaggctagaaaaggtgtaatctgagtccatgacagcagaaacaaagggaagtgtccatcaaggcatgaaggaaaacaagttgaactcaattggtatgaaagaacaagaataaacgagcacaaaccagttgaaaaataataagcctgacattatgtgctgaaagtctgaaagtggctgtatattgaagaaaaagaaaaagaaaataaaaaagaaagttaattgttttgttttatttactgcagaaaataaaattgttgaataaagtaccaggtttgaagagaatgaacaaggaacatggaagaccacatgattggacttaagggactggatctagcctcatattagctattttccaaagattttcctacccttagcccagccaagttacaagcctaaaagaccttttgatctaattatgctcgcattggttgagaatattttcaagcttatggtaatgttgtgactatgttgagtgagagattattataacctgatacacttgagtgaatgagtgaaataagcacatgctgtgaggaacactcaagttactatcactaattgacagatttgaaagtaccatagaagctttgatatgaattgattatactcagcatgataattctaggattgtaaattgtggttcagtttgattattgatccttgctcttatcttagagttctgtctgttgctgaggatatcaactattaaatctgggaattgtttgatgtgttgcaaacacatcatagttttaggttagttttaggttagatttcaatagaatcagtaagatttaggttagaaataagttagtttgttatttatcttttattatatatcattttattaccaaagtgcaatttcagggctaaaaagaggagttttaaagcaaaaagaaaaagaaaagcaaagtgaaggtctggtgcgatccgcgccaagtactgcacgacccgcgccaaaagccaaaatcagccatttaagctcgaagattccacgcgagtcgcgccatgttcacgccagtagcgccatctatttgaagctcccgcgcgatcagcgcggtaaccggcgccatccgcaccagaaggcctgaaagcaattttcactcgtgctatccgcacgattagtgcggactacctcgctaccagcgccatgaattcgaaagactggcgcgattcgcgccataacccgcgccatcagcgccacggaatcgctgttgccttatttaaaaagattgactttgaaattggcacagaaaataggctttgttactctaattaaatctatctataaataaaagcctctagggactgaacaaatcattgattagacacagaaacacacctttccacacctctctacacttctatacatcattctacaccattggaaggcaagaatcaaggctaggtcactgcagaataatgagttatttgacaactttggtttctttgaagcctatggcaggctaaactttgtattgtgggaaggccatgaactgatgtaaactcctctgtaacttgactggtattaaatgagaattcttattgttttattttactctatgctttattgttaattcttatttagaactggccattctatttaggtattgagggttaggattcgcaatggggacgttgggattctaatttctgaccttagtaaaataacagttgttcattacctagggatagggatgcgtggctgcggaattttataatatagtctttataagcttaacttgatagatttcaccaaggaattgggtcgttgattcgggttaaagggttaattcactaaggaattagggattaactagagtaggaaagatttattctccgagcaaaagaattcggaaccccttatgatatattctcttaatgcttagtttgacagaatcgctaagggcttaggattctcgatcgaattaaagggttaaatcactagttatctaggagttacgaatttaggagagatttatcatttgtgaccaaacttgataactcagtcgagtgaaagaggcagtgaacattagggattgtacctgaccacaattgtttcttccattggtaatactccaatttattttattgtttattttattttcagttatatgcaactcttcgatacacaattatccaaaaatattttctttttacttccaattacttagaattgatattgctgtgaatttcaccccaatccctgtggagaacgatactctacttacccactttattacttgtaacgatcggtgcacttgccgtgttttgccgagtcgcgcaacactcagctgaggagatatgtactagatccttcgcacgtggtggaacctgacatcgttcaaattagggagaatctgacttgtcctacacagccaatatagattcttgataggatggagaagcaaatttgaagtaagactattcccatagtcaaggtactgtgggaaggaaggacacctgaggaggggacttgtgagcgggagcaggagcttttacagttgtatcccgagttgcttgacaagtatggctttgaattttgtggacaaaattcttaaaaaggtggggtgaatataaaaaccaaggctaaaataaataaataaataatttggtgaggcttctggttcccgacgcggatagcgccagatgcggtgtcgttagcgctaggatggcgccagtagcgctagaagtggcaccattagcgctagaatgcaccagaaggccatttctctctagaatttggcatggttagcgttagagtggcacggttagcgccaggaacacgtctagacctctggaatttggcgccaatagcgccagaatggtgtcattaacactgggacgcgagctgagtcactataaaaggcccaattgcatgttttgtgagccaaaactctctctctcttcttcctctttgcatttccaccattattaagcaagaaaagcttcacaatcactcattccttgaccaaaacacttcacttccaacatgaaattagaaggatatcacccaatgagctagattccaacctccattttccttgaaaaccattaaatgaagatatcattttctctaggggacttcacaaagttggattttggagggtaaagaaggtgttttaaggacatttaagcttggagaagttttcctctagccttccttgtcattttagaggtaagaaacacaagttttaccaattatttaagaatttgttcttgagatgaatactgacccatttgagttagagctgaaattaggcttgagtcctttagaaaagtatacttaggaggttgttgtgatgaaggtttagccttgaaatattaattttatggactttggaatttggttctgagaaatgtatgtgttggaagaatgttggttgaattgatgatattatgggatgtatggacctttgtgccttcacaagatgtggttaggagactatataaatggtgaaaatgtgttgaagtgaccgttttaaccaccttgataaccattgaaatgtggcatggataaagtattgaactctttgaataggttgatgcagagtctgagggagactctagtgccttggttaggccaagatagatcctattgggggtctgtaagtcaccaattaggtaactagtccttatgacttagaaaagaggtttatatggaaaagaataacgtttcttttcattctaacggttgagaaccgttattgattgtttgtatatctttatgtagggcgtgatacagaggttatttgtggctgtgacaacgaggccgagagaaccgatgtagctcttagagcaggtaagctctttattcttgggagtgtttccccttgactgtgttctaccatactcctagggagtgatagttattgtatgtcatgatgtatgtcgtattgaaattgtgtgttactgcttttattgagaacatgtatataatgtacactgtgatgatatgttgtgtgattgatgagattctctagccagcagaatagactacttatggactttctttggaaatgtgcctttaagtggatgatcttccctcagaagtgccatatatgttcgagtaagtcctgagagaatgtgccatttcagtgtatgatctttctcaggcattgacataaagtcttgagggaatgtgcccttaagtggatgatcttcctcaggcaatgtgcgcagagtcctgaaagaatgtgcccttaattggatgatctttctcgggaaatgatgcggaaagtcctgagagaatgtgcccttcagttgatgatctttctcagaaatgttatatgtatatatttgctatatctgtgttgcattcctgatgttggtagcgcccaacggaatgacacctgtgttgtgatatacatgtgatgtggttaatgagagccgtgatggccagattgtgtgtgatgccaattttgatactatatgtcatggaagtgaaccagggggagaagaggcctccaagaactctgagtttactgagattgtatctcaccccgtgtggggattatatttttgcaggtgatgcttagcgagcggatggtggatcccagggcaagaggcccgagtagggatatggttttgtgtgaaccttaggcattttattttgagagcatgtggatcatttcttttgtgatgcctgtatttgtacccttgaggggaggttgcaccgttgatgtactttttgtatatgtggtatatctgagagatattgatgtatgttgagaggacagggtatatgataccttattttgtatagccattactgagatatatgaatatggcttatttggccctatgtttgtatgatgcgtgtaattaccgtacataatgtaaagatgttattgttgatgacgtcattttgtttattgcttctgaattgattagttttaattaattgcagcgcttaacggccataaatgaatgttaatgaaccgaatgcatacagggcattacattttgtgtttagtgatatcttccaaatgctaatgggcatagcaatcatcttttgttttatatcatgtgacctctggatactgttgtgcgatttatgcgaatatgtatatacggcaagtgcaccgatcgtttaacaagtaataaagtgtaagtaaagtatcgtctccacagggattggaaagatttcgtagtaattataaggattatgattgaacaagaaacagaaaaatacgcaaaagtagttggaagattgtgttgaattgagaatgaaatttaacaaaacagtaaaattaaattcgagagattaccaatgagaaataattgtggtcaggcgcaatcccttataagtatttcctccttcaattgactgattattttaacttgaagtttacataagataaatctctcctatattcatgaatcctagaactactagagtcataaccagcgattcaaccctttaattcgatctagaaccctaaccttctagcgattctgtcaaactaagaattcaaagaacaaatcttatgggttcgtgttatgtttattcggagaataagtcttttctattttagttaatccctaatgtcttagtgaattaaccctttaaactgagtttgtaacctaatgtcttagtgaaactagtcagttcaagcaattaaagaacatattataacctccgcactcatgcatccctatgtctaggtgaagaacaagtgttaatcttaacaggtcagatcttataattccaacgtgtccattgcgaagtataactctcaatactcattcagagtgatcaattctaaacaagattatgattaagctcagaaaagaattaaaataaacaaaacatatgcatttaataccagtcaatttgcagagggaaactcataagttcatggcctttccacaatgagatgattagctagccataggcttcaagaacaccaaaacaattggatgaaacatgattctgcagaactttgactcaaatcttgattcctagggttttgccttcaataaaactctctaatctatgtgtaattgtatctccaaggctaggtccctgtaagtgtaagtgtgacccccccttttataaactcagaaaacacccctttttatcgactattttaattacagtaacttatcaaaaagcttttcctattttcgaaccagatatcttttaattaaggaaagaaaagcatagccacgcgagtcgcgtgggttggcagtagagaatggcgcgtgtcgcgtgggttctgaagtgcctcgcgtggagtggcagaaaggaatttgcttttggctttgagtaatgacgcgatccgcatggagtaccaagtgtgtcgcgtggataagcagagttgaaatggcttgacctagagtttctcacgcgatccacttgaaatatggcgcgtgtcgcgtgatatcttcgggtcttccaagtgacacgcgtggattgtggcgcgacgcgcgtgaggttgcagatcttgtttccttctttatttgctcttaaattccctctttttggcctgcaaatgctcaattggtattaaaatgccttatgtaacacaaaatatcaaatatgcttaatttctagagctattttctaactattcaatacaaatatgacctaaaactaagctatttttaagatgtgtttgcaacacatcagatactgcttgtcaagaagtaacactagtttatgtgcacaggcaaatcgaaccacttaaagatgctatagttttttttttgtttttttttctttattgtttatcatgtgaatttgattgtccttttgaaaaccttaatattatcaattgtataatattttgaatgatgatattatgctctgtgtttatcctttggtcttcttttatacattacttttttggtgcttcaaggcattgtcctcttggcttggaaattcctttaaaaaatatcctggcatatctcttttgtggccatactaataactcaaacttatcaaaatatgcttgtgttttgctcttttacttttctcttgtttctgtagacatcaacctatcaacatttacctccaatccactctgtcaaatcttatccaattgaatgatatgagattgactatagttgcatatgtgtggtaaaagctttgaggtcaattggaaaagcagtgagtacattttacatggagtagtcatatttttattgttatcattgcttcaatataaattattgatcaaggattttaatagagtaatcatatttttagtgttttcattgcttccatataaaaataaccttgtgttttatttcatgtttaagagtttttaaaataataaattgattattaaaaaaaaactattcgtaaaaaaaattaaataaatttaaactaagacggttatttgaaaaaaccgtcatagtataaatttattttacttaaaaaaaatatatgtttaactaagacggttttaaggaaaaccgtcttagaatgtggacattctaagacgatttttcctaaaaaccgtctttatttaaatttattttattttttaaaaaaaagttatttctaagacggttcttttgaaaatcgtcttagaatgtcacaattctaagacgattttctaaaaaaccgtctttgatttcatcttttaattttttttaaaagccttctaagacggttttctgaagcaaccgtcttagaatccttgcctacgaagatggttcaataatcgtctttgaaagtcttacctttcaaagacgctcgctacaaaaacggttcaagaacaatctttgtgtgggtaaaacaaccgtcttaaaaaaagtgcttttgtagtagtgtgacggttatacatgtcgtaaagaaattaaacaatgaattatatattgattttaatatctatgatataatatttgcaaaaggataaattttgaactttaaaatatcagtaattgaatgataatattgtagtgtgaagccttcaaataatgagtaaaagcatgtccactataatacaactaaatatatcatgttgatcaagctggtacatgtttagctaaaggaaagaaataaaaggggaaataaaggaaataaatattgatttgaagatttgtttcaaaagtaactcaaattaaataagattgcataaaaatatagattaaaaagcaagagaattcagttctggaatgtatcaaacacttaacaaagtttcaatcaatgagaataatcgtttgggttcaattttattggactttctaacatgttttcattacaagttcctattcaattaaatttatattaccatcaacccacaaaagtattcaggccctaatcccttaaatgagagaacctaagttctttgattctattatcaatcttttgaattagtgtaatcaaggtacttgcattaagaaaaaaggtttttacaatgactaattctttatactgtatccctaggcataaaaacgattggttatcttcttcagtttacaattcaaaataatttttcaattacaattgaaattatagaatcatgcaagagggtgatcaagccaaaagcaagcaataaacatagaagaagaacaataataacactttattgaatagaaataaggtagcaattacacgaaagtatgatcaattgcattaaatcccaacgaaggtgagaagttagctactcataatcatgaaaaagaaagcacttgattgatgaataatggagaaaagcttccggtgcatacaacgtcgtttggcaaatcccaatctttttcttcgtctcaagtgttcaatctttggaaacctagactagactagaaaaatcatatttaaagttatgggctaaatgtagtttaagcaccatgcaaaaaagaatgaaaagtaacagggaattctcgcaatagacgttgcacgggtgcagggtcccaccgtgtgggtgtatagttcttagccacttcaaatttcaacattgcacaagtgcacaaattccttcataatttcatgcacaggtgtgcgaggttccaaaactatcaaaaaattcttttgcctccacaaaacatccaagctttagatttttatggactgaaggatccttgacgcctcaagatatcacttaagatatatcttttgcctgacccttgctttcacaaagtttctgttggtttcttttctgttgcttgactaagtcaaaaccacataaggtggtccattcaccccatcttcttaggaataagttgttatggatcttatctcttatttaagctactatgcccacgttttatgcatatcaaaaaacaacctcgttaatgggaagagcttataaaaggagatgtgcaccatggtcaaggtctctatgctgctatctgaaaaattccaatacaccatcaatgagtgatagtgaaagcatagaagacccctaagccaaaagttagattagtttgaagactcaaactatttatagattagttgactcacggacaactgcaattcatcttcggaacaaacaagaagagtaatagcgggaggtatttatgatcttattttttatctgcatttgatctaatagcttctgatgtatataagcgtgattgatcatttagtttttcttacatttggtatcagagcccgtttttgcctctgccttgcttttgtttgacactcatatttttgaaatattgttttattgaaatatgggtattttatttgaacgttttaattattaagaagccttggaattatatggaaattgagtttctatgctttctgtaaattaaaacatggatttcggtgttgaaaatgggtaaaaaaaacaaaccattttgcactagttgagtctcgaacccacgtccatccttttagtaaaacccacacagacaactgagctatttaagattaattgattatttttcgtttttctatgtcttatatgtttatgcattctggtttaattttggaatttgtagagttttgatttgttttatgcatgaatatattctagaagtttattctatgcatatgtatatatatatatatattaaatcaaaagcataaattatatttcaattatgcaattgtatatgagaattttattcatcattatattatatcttaatcttgaagttcataatatgatttattctcatatggttaagttttatgtctaagtgatctttataattttaattaattatggattagtcacaatatccataatttgattcaaattatatattataatgtttaaagatcatataaggaattaggcataatattgtaattaattgttacacttttcaagttattatttcgtgatatttaattatttgacattattgcttggagtttgatgtaataatataaagataatgttaatgatctatgtaagttaattaattaaagcttagctacaacaactttaattatttatgttatatattaagagcctttagatcacataaggtagatgatattaattgtaattaatcatatataatttagtagatattatcccacaggaatttatattataattttgtatgattaattaggataaaatattaaattatatttttttgatttgtcaaaagggatcaagagatataacttgatagttctatcataatgttcatgtgaatttaattgaattaaaattttagctcataggcaaattttatgtcactaaattcataattttgtaagcatgacttacattggtaaagcatgatacattatttttgtctcaaattttaatgataaacatatatgttgaattattttgcaactatacaaactattaatacaattgatgtcctaaaattgataggagattatttttctatatggaaagaaatgattctgctgacattagtgtatatggacattgattatgctatcaagaaagctaagccaccagcaactacagagaattgtgagccataggagatggatctatatgagaaatgggaaagattcaactgactttgtgtgatgatcattaagactaaaaaaataggttggtattaagggctcagttgaacagtatgacaatgtgagagtgctcctaaagtacattgatgaacaatttgagacttcagggaaggcattggccagtaccttactaatgaaattttcttccatgaagctcaatactctgaggggtgtgcatgaacacatcatgcagatgagggacattgcagctcaacttaaaactctagaggtggacatatttgactcctttctggcgcattttattctgaatactctcccagcaccatatggtcccttttaaaatatctaacaacacacataaagacaaatggtttattaatgactcatgatcatgtgtattcagcaagagcgaaggttgtagttggaacaataagagagttctcttatgacgactaaaaggaaggataataagaaaggccataagaacaagggaagtggtaaaataccacctcaagctagaattaagaaagaattcaggtgtttcttctataaaaagaaggggcacatgaagaaagattgtcctaagttcaagctttggtttggaaaagaaaggtatgcctacctctttagtttgttatgaatctaatatgattaatcataacacatgaagaattgatatgcaatatggtattttctatattaatttgcaaaatgactgtaacaccctggtgcacccggcgtattaacattatacaatatcagagtaacgcagcatgcatagaaatgaacggtaaaggaagcatgaatccaatataatatacatactttttacatatatggtgaattaactgtcgtatacaaggtacaaaattctcaaaactacacaaatgttccctaggcatcaaaatacagacagattaaacaaaatctgagctaacaagctcaatcatctaaacctagggtgatcttcacattatcccagagcaggtctcttgccttgggatctctcagtaaccgtagtctttgctcctgcaacataatccccaaacaggggtgagataatcatctcagtaaactcagggttcttagaggtttccctccccctggttcacttcataacatataggtataggtcacataacagaacataacaaaatcatttcatttgaattctcatcatacaatcagcctttacggcacacaagaaacatatgtattcacatggcatctcagcacaagcatctacaaataacacacagggtttgagagagatcatccatgagagggtacattctcttggactcctcactgagtacctgaataggatcatttcctcagaggtacatctactcaaaactcgctccatctatgcctaaggaagatcatccgcttaagggtacatttcctcaggactttctgcccaatacctgaataggatcatctatataaaggtacatctactcagggtttacatggacgcttatggattatcccgtggaagatcatccactgagtgggtacattcccaaggggtccatagttccacatcatactagccagtaagttctcacacaattaatccatgcatcatcatcacaatcactatattctatactatctcagtgtattaatataggcatataccctatctcagggtcattctagcattcaattgtcagaaatcatcaaaccatctcatcaatattcagcacatatccagaatcgcacaactataaatcattagtatacaagccacatcaagcaattacccatattgggtgtagtgaaacataagcagggaaacaatccctgaaaacactgaccttacctggtcgtagctcagaatcagctcccctagtctctgggtgatctctaccagcagtatgcacgtcacgccctacagtaggcatgaatcaaatcatcagaaacgacattccaccgtttatatggaaggaaacacccttccacacataaccaattcaaagtcctctaacttaaggtttatcttaatccggcttctactaggccatacattgaccctcaatggtctgccttagtctcaccaaggcctcagagtttctttagaactatgtatagctcaatttcaaagctgtaccagaatcaagaacccacattggttcaactcagccaaaaacacatatataatcatgttttcaccgattatttggccttatgaataacttttgtaaaggtacttaagttaatttaggccataacattgctcattcacacacttttctcccttcccagagccaaactcaaacttcatcacaatttcaatttcaacatgccatatggctcagaacaacctcctgactacatctctctaaagaacctaagcctaattccagccctatcaatacttggttactattcatctaatccccatttcacaaattaaccagttaaaatatgagtttcttatcgcatatcaataaaggaaagttggagaagtccctctcctcgctctggtgtcctgaaaccagcgtctttcccttccaaagctcaccctctgaggaaactcaaggaaatgggagttttctcacaatctaggctggattttggatttccaagggttctaatcaagtttataggtgacaaggaggtgttttagtggcttacaaggaagatatgaagcttctaaggtgcatcaatggtggtctaggcttagggaagaaaaggaacagtgttttggagccaaaatttcgtaatatggcctttaaagacagggtctgccgaccttcccgcgctaatcgcgccatatatggctctattcgtgccaaattagcgcaacaaaaagtttcctgggcacttatggcgctaatcgcgccattacggcgctaaccgcgccaactgggcgcatatgtggcgctaatcgcaccaaactgacgctattcgcgccatcaggccgcaagaaatggccttctggttcaattccatgctactagtgccatgtcccacgctactagcgccacatcccatgctaaccgcgccgttcccacgctattagcatgggatttttttttttttttttaaatcaaggttattataatgacaccacttatgatgctatgcatgttaatgttggcacaaaacgatgtgttatgagtgaggattcgtctatattatggtacctaagattaggacatatctctatcgagagaattaagcgattggtaaatgaaggggtacttagtgctttggattttgctgattttgatacttgtatagattgcattatgggtaagcaaactaacaagtctaagaaggttgcaaagaggagctcaaatttattagaaatcatacatacaaatatttgttgtccaaacatggacgcaagtagtccgaaatactttatcacattcataaacaatttttcacgatatatttatctctacttacttcgttctaaagatgaaactttagatgcctttaaagtttttaaggccgaagtggagaaacaatgtggaaagcaaattaagatcgtgaaatccgatagaggtggtgaatactatggtagatacatggagaatggacaagcacctggtctatttgtgaagtttcttcaagaacatggtattgttgcccagtacactatgcctggttctccggatcagaatggtgtggcaaaaagaagaaaccgaatcttaatggacatggtgcgaagtatgcttagtagttctaagcttcctaagtcattgtgaactaaagcactgaagacggcaatgtacatattgaaccgagtttcaactaaggttgtcccaaagacaccatttgagttatttaagagttggaaaccaagtttgcgatgcgtttggggatgcccatctgaagtgagaatatataacccacaggaaaagaagcttggcccaaggaccattagtgaatacttcattggatatgctgaaaggtctaaggaatacaatttttattgtccatttcatagtacaaggattgtggaatcaagaaatgttgaatttcttgagaattactagattagtgggagcaatcaatccagagattttgtttttgagaaagatcattcaattactcaaccatccacttcaaatcttagattgtttgttattaacaatacccttccaactcaaccgggtgttgttctttttcttactatgaggatggatgtagatataagtcgtctcttggccagggcattagcagagcagcttccactcctcccttcgataagcttccttttttgggcactggacttgcaacctatgcacaacctgctgataatctagtagatcaagttgttcatgaggagcaagaagaaattgttgatcaaccaattgaacaataagttcctcaagaagataatgaaacaacattaaggagatatactagaataaagaaatcaacgataccgcatgactttgttgtgtatctacaggaatctgactataatattggagctgaaaatgatcctgaaacattttcacaagccacgagttctaaggaatcaaacttgtggtatgatgctatgaaagattaaatgaattctatggcatcgaatggagtctgggatcttgttcagttgcctgatggtacgaaagccattggatgtaaatgagtcttcaaaactaagaaagactcattaggcaacattgagagatataaagcaagactcttagccaagagatttaatcaaaaggaaggaatcgactacaatgagacattctctccttatctaagaaagattctcttcgcatcattctgacactggttgcacattttgacttagggtctatgtcaaaaggcaaggcaccaggtcttcacctggattggtgacaagaaggcaagggtcccaacacgcagatgggctagcgtggtgggcaaacaccgcccaggggtttatgatgaaattgggaagctagaacataggaacattaacgggtaaaccgagggagttagcaaatgtttttgccagaaggaaagtgaatattgtttgcttgtaagaaactaagtgggttggagaaaaggctaaggaagtggagggcactggttcaagttgtggtatacaggtacaaccaagagtcgcaatggggtttgaattatggtcgatagaagtttcagagataaagtcattgatgtcaaaaggaaaggcgacaagattatgatgattaagcttgtagtgggggatctaattttaaatatccttagtgtatatgcacctcaagttggactattatcaaatgaaaagaaccaattttgggaagacttggagaaggtcctgagaggaatcccacgagagaagaagattttcctaggagatctaaataggcatattggtaaaaaaaaatggaggttttggtagaattcatggtggttttggctatgggacgagaaattaggctggagaagatgttttgaacattgtgctagcctatgatttgatgctagcgaacactttcttccggaaaagggtgtctcatcttatcacgtatcatagtggccaaaattgtagtcaaattgatttctttatggctagactagaagatagaaattcttgtgttgactgcaaggtttaccctagagaatgtgtggtgacacaacataagttggtagttttagaggttaggttcaacaaagttcttaatttgaggaaaaaggcttaaaatccaaggataagctggtggaagctaaaggaggataaacatataaagtttaaggaaaacatgttacgtgaaggaccgtgggagtttattggagaagttaatgaaacatggaataagatggctatgtgtgaggaagggtgctaggtgaaagtaaaggaaacaaagttcttacaaaggaaacatggttgtggaatggataagtgcaagaggctattaaatagaagaagtaatgctttagatctttgcataagtgtctcaatgatgagaatttgcaaaagtttagagtagagaggaaaaatgcgaagaaagcagtgcaagaagctagaggtaaagtttttgacgatttgtataaaaatcttgggagcaaggatggggagaaaggtatttacaaacttgcaaaaatgagggataagaagagtaaagacctcacccaagttagatgtatcatggatgaaaatcaaaaacttttggtaagggatgaagatgtaagcgaaagatgactaaactactttaacaaactttttaatggaaatggcgacaagagtgaggtggatttggaggacgtttttgattatctgaatagaagatttatgcacagaattaatacacatgaagttaaggaggctttaaagaggatgaagaataataaaactttgggacctgatgacatccctattgaagtgtggagaggcctgagagatgtgacaataaaatggttgaccaatctttttaataggattcttcaaacaaataagatactggatgcttgtgcctatttacaaaaacaagggagatatccaaaattgttcaaactatagaggcatcaagctcatgagccatactataaagttatgggagagagttatcgaacatcgcctaaggagggagaccaaggtttccataaatcaatttggatttatgccaggaagatgtaccatggaagctatcttcttaatgagacaattaatggaaaggtataggaaaaaaaagaaagacttacatatggtgttcatagatcttgaaaaagcatatgatagagtcccaaaagaagtcttatagtggactcttgagaaaaaaaaggtagcattaaagtatgttaatgcaatcaaggatatgtataatggggctaccacatgagtgaaagcttgtaatggaacatcaaggtatttccctatcacgataggtgttcaccaaggttcagctcttactttttatctctttgtcatagtgatggatgaactaacgaaagatattcaagagaaagtgtcgtggtgtatgctttttgcagaagatattgtgcttattgatgagaccaaagatggtgttaataggaaattagaattgtggagaaacactttggagtctaaaggattcacgataagcaagagcaagacagaatatatgaagtgtgagtttttgagagtaagagacggtgatcaagacacaatgcatctacatggtcaagaggtacccaagaaagatgtttttagatacttgggattgaaaatgataagaatacttcaacacaaccaagaggggggtgaattggttgaaccttgtccaattaaaatttaaaatcagagtattaccacaagatctttatcactttcaaaattatttcaaaaccaagaatcaatattcaatcaaattccttttccaagaagaatagaaaacagggtataattttttgtgcaatgaaattgattcacaaacaaagcaattaagagattaacaggtgagaagaaagattagtccagatttttatactggttcacctcaaaccctatgaggctacgttcagttcttctactcaacactagagtagagttccactattgtaaaaattatccttacaagcaaatttacaagcctctcttcatcaaccctagatgaagttcagagatccaaaaccctattagatccttagagaccaaaacccacactgagaacactactcagctgtcttttagagaaacattatctcacacttgcaagaaactcaattacaatagactaatccttacaaatattcaaagaatagtttacaccatcaaagaataaggaaagctatcacctgataatccaagaatgaatgcacaatgaatgattttcaggttgaaagacagattacaatcacatatgcagtcctttccttatgctttgaatgaatgaagcttcaccttcttgaatcaaaaacccatatgagattttgtgaagctaagtatgtttagaactcagagaaactcactaatgaaagctcagaatgtttgtgaaagcccagaattcaaaaaatcaaaagttgcaaacttcagagaagtgagttctatttataacagatttttaactgaaaataatcgattaaacacgctcctgtaatctattatttaccatttgtaatcgataaaatgaagactgtaatcgattaaaatgctcctaataatttctgggtttgggctatgaataatataatcgattattccgtgaggtaatcgattaaaccagtcagtcatacattctaaatgagcttagtaatcgattaatatgatatgtaatcgattaaggcagtgagctatgttttttctaagtctatatgcataggcttgtaatcgattaccaactctatgtaatcgattaagacagagagttccatttttcataaaaagtcttagtaatcaattaaaccgatatgtaatcgattacaatgatcatgatttgttttctaaaggcatgaagaacaaaataatctattccagtatatgtgtaatcaattacttcagtaaaactttgtttttccaaaaacttaaccttttaaatgccttagttatatactgcctttgattaaaccttttaatctaatgatcctaaatgaatgattaatgcatgatgtgcacaattggattatcagatcatatacttccttttacaattaatcaaattggtcttcaatgctttccatggaactttgcctttgtgcatgttgaaagcacaaaacttttgagcctttgattcttgttcattgatgcttggcttcacttgaatcaacaatctccccctttttggctttaaacatgtcaaatcctcaatttgattaagcacaattacttggagattgattgtcaaattccttgtttgaatatgcttttataatcctgaaataatcaatatcttgccaagaaccaagtgttaaagtacacgttgctcatgagtaattcaaataaccaagtgttaaagtacacattgctcatgagtaattcaaataagcactataccaatgattagtttccatttaacacagttactccccctcaatcttagcatccattcaattcaaattttttttcttccaaaaaccgaataaaaaatagaggcaaatagagttgtttgataccactcgcccttaatcaattatccccctatttggcttgttaaaagtaaaaaataatgtgagcacaacggattttaaactggaattgcatgactttattaataggatagcacatggggcagttacataatggaatttaagcattgaacataagagaaaacagaacataacattgttcattccaaatagaaagcagatcagacaaaatctaaatctaatcaacaaaataaagtccattacacagagaaggcatatcaaacaaaaactaaatctaatttatcctagaattctgcagaggcttcatcattcatattagcctcaatagcatccagcctttccctaatttcttctaaggctccatgagtttcagccttgaagtcttcttgaagcttcagcattgtgtccatcttttgaatcatttgtgattcaaaattagagaaggcttgaggtgcaggctgtggttgttgttgttgtccctcatcctcagaatcagtagccatctctccttgctcagcagcaccaatttgggcagccattacccagccttggggtgtcttcctcatgcccatcttggttaaatgcttctccttaatttgactgttgtaggagagagtgttgtctacaacttcattttcaacatctatgttgaaatgatctataagccttgaaacaaaaacaggataggggaaggggtaattaaccaaccttttagacttaagcatgatttcttcaaaaatcagaggccaatttgatgaggattcactatgtctccactttggtttcctaactcttttgaaagtaggctcgaacattatacagactagactcaagaaaagtgcagaaattttgcagagactgcagaggagagaaagagaattggtgcagtgattcaagacatacaattcactatttataggcaagaatcagagcataaacgtctatattttcaaaaaatataactgttgggacgatttaatggcattgggtgcagttatagcattgattgggccgttaataaattcacaaacttcagccagatttcaaacaatagtacaaataatcgattatttcgttgtgtaatcgattattccagttcaattaggtttctgttaaacatttggtaatcgattatttatataagtaatcgattattttaaacgagatcagaggttgaagaagacttgcaatcgattcttttcatatgtaatcggttattccagagctcttatcaattgaatcaagtatcatagccatatgtaatcgattatcccgagtggtaattgattatcacagagtgagcatcatttcaatataaatggtaatcaattatggctcataagtaatcgattattccagagagacgtgcttgacattttgaacttttggacaatgtaatcgattatcccgatgtgtaatcgattattccagagaaaggtgttttctaaaaatgtgaagaataatcgattaccattgatttgtaatcgattatatgattacaattttcgttccagacttgagttttaatgattttaatcgattaacccgtggtgtaatcgattactacagagcattcatcatatacagagcattttagcagctttttgacaatgatacaaacacacaagcatttaaggacatataggatttcataaatcatacaaaccacaaacaaaacaagctagataatgttattctcatcaaggatccctagcatgtttctaagtgtataaaatctatcccttggaagtgcttttgtgaaaatatcagctaattgatgattggtgtcaatgaagtctacctttatgttacctttttgaacctgatctctaagaaaatgatgcctgatctcaatatgctttgttctagagtgtattattggattctttgatatgttgatagcacttgtattgaaacatagcagaggtatagcattcagttccactccataatccagcatttgttgtttaagccacaagctttgtgcacaacaacttccagctgagatgtattcagcttcagcagtggaaagtgctacacatgattgcttcttgcaatgccatgagatcaatgagcctcctagcatatgacaagtgccacttgtgtttttcctatctaatttgcaacctgcaaaatcagaatcagaataaccaatgatatttaaagaagcaccttttcgataccaaagaccaactcttggtgtagcgttgagatatttcagaattctcttgacaacagttagatgtgattccttaggattggcttgatatctagcacacaaacaaacactgagcatgatgtcaggtctgctagctgtcaagtataacaatgatccaatcattcctctgtactttgactcatcaactttcttcccattttcatctgtatcaagatatgttgatgtagccatgagagttgcagcatctttgctcttctccatctcaaatttcttgataatctcaagatagtacttggattggttgagaaaggttccattcttcatttgttttacttgaagtccaagaaagaatgtaagttcacacatcattgacatttcaaattctttctgcattgctgatgaaaaatctttgcataacttgtgattagtagaaccaaataaaatatcatccacatatatttgaaccagtaagaaatcattgccaagccttttgataaacaaggttttatcaacagtgccccttgtaaaagattgttcaagcagaaatttgcttaacctctcataccattgccttggagcttgtttcaaaccataaagtgcctttttcagtttgtaaacataatttggatgtttaaaatctttaaaaccaggaggttgttcaacatatatgtcctcttcaatgtatccatttaaaaaagcacttttaacatccatttgaaaaagtttgaaatccatgagacatgcatatgcaagtaataacctgattgcttccaatcttgcaactggagcaaaattttcctcatagtctatgccttcctcttggttatagcctttagcaaccaatctagctttatttctgactatgattccactctcatcaagcttatttttgaaaacccattttgtgccaatgggtttaagagatgaaggtctaggaactaattcccaaacttcattcctcttaaactgattaagctcttcattcatggcatgcatccaatgttcatcattcaaggcttgatcaatgttcttaggctcaatttgagaaacaaaagccatatcacaacataggttttttaatgaggatctagtagatactccctttgaaacttcacctattatgttgtcaagtgatagatttcttgttgttctccaatccttaggcattggtacaggagttgtggattctgtttcagttattggttcttcaattttggttgagggattgcctatttgaattatttcttccagctgacttgcatcattatccaactctttttcctccttagagggattagtttcatcacaaattacatgtactaattcttcaatgcacattgttcttttattgaatactctatatgccttgctatgtaatgagtatcctaggaaaattgcttcatgtgccttagcatcaaattttccaagtgattctatcccattgtttagtataaaacacttgctgccaaaaacttttaaatgagaaacattaggctttcttcctttgtatagctcataaggtgtttttgtaacgccccgatccactaatcagggtcattaccaaacacaaatcacaatcaagcagataatcaatcagagtttaagcagtttggaagcatatactaaaagtgacatcatcaaatgtcatctgtataacactgtacactataatatggtgaatatacatcaaagtctctctgtacaatacaaaactatacagaatcccataagggtacatcaaaatacaaaaccaaaggctaaatacaaagcatcagagtaaaagctcatgttctctagcctaaggtgtctatcagcagctaatcctgcataggcttcttgccttgggatctatctcctactcgagaagaatcacctgcaaaacatagccccacacaaggggtgagatataaaatctcagtaaactcagggcccttgaaggtatttccttcccctggttcactgacaacacatacatatatatatcaaccacaatcacaatcatcatcagtgaatcactcaatcaatcatcatgcacaatacaccttactgcaatcaggctattcacatccatcagccaaaaccaaggcataatcatggcatacagccattcatcacatcaataactgtcatgcagaggctacatctaagtatataggaacatctcctcacagggaggctacctctatatactcggcacatctcctgcatgtatccctagcggaggcttcctctgaatatataggtacatctctatctcgaggattcgtctatatatcaggtacatccactttttggtgaggccacctctgtgaacataggtacatctcttatcacgaggctacctctatgtatcacagggccatctcatcctctaacacaatacaattgcctgaggaggctacctctgtgcatatgggaacatctccacgtaggaggctacctccatatcacaggctcatctctcaccgggtcttactcaatctcaaatcatctatcctacgacaataggatactattcaagcacagcatgcataatcaggtttcacattcaacccgacatgccacaattcaatcacatcatagctatgcatatcaatcccctatcccagggttcagtgcacatttcaggcatatcagatcaatacatctcaatctccctctcatagggatcagaacatcagtacacagcatttatatacatgcatactcaagtgttataatcaataaggcatgctatcaatgaatcatagccctatacatcaatttccctttctcagggatcaagtgcatatcaattccctttcagggagcaaatacacctcagttccctttttcagggatcaaatacacatcaatcacaattcatggccatacataataatcacccatctctgggttcagatcaaatgtcaagcatcaattacccttttacagggttgagacatcattcacaactcatagctatacacatcataatcacccattctctgggctcagatcaattataaagtatcagctacccttttatagggttcagaccacatctaccaatcattcacatcattatacacgttcctctactagcttaaacacatatcataaccataatcccagtggatatatggtggaacgcagccgaggatacacaaacaagaaccaagagcttacctgctctagacagatcaccggctctcccggcctcgtggtcaacaccaccagagctctcacgctcacgtcctacacaagaacaagcatataatatatcagatacggttctagaccgttcaagcgaaagggaactctcatcctttctataaacataaactaatcactgtacaagtgattatctaatcgtcaacaggatccctctcagcctatacaaggctacagagcctccacaacaccattttgctggggtgttcttggagctgaaaaattgtggttaattccattttcctcacagaatttttcaaaaagttcattttgaaattcaccaccatggtcacttcttattgaaataattttacatcctttctcattttgagtaagcttggccatttttctaaaagcaaggaaagcatcactcttggatttcaaaaacaaagtccaagtgtatctagagtaatcatccacaatcacaagtccataatagttgccacctaaactcatagttcttgaaggaccaaacaaatcaatgtgaagtagttcaagtggtctagaggtggaaacaatgtttttactttgaaaagagttcttagtttgtttccccttttcacaagcatcacaaagtttgtccttctcaaatttgagttttggtaacccaataactaaatcttttctaatgagcttgttcatgtgatgcatgtttatgtgacttgctcttctatgccacagccaagtttcatcaactttacttattaggcaagaagatttatggaataatgcatgatcaattgaaagcacatatatattacctttccttttacctatatgcagtacctcaccacttttctcatctgagattatgtagcaatccttattgaagttaactttaaagcctttatcacacagttgacttatgctcaataaattgtgctttagtccatctacatacagcacattttttatctttgccttaatgttgtctccaatattgccttcaccaatgatcttccctttgttgttatcaccataagtgacatgtcctccttcttttaaagtcagatttgagagaagggacatgtctccagtcatgtgtctagagcatccactgtcaagataccaagttgatgtcctagctcttagacacacctacaaaaagcaaatcagattttaatagaaggtacccactcaaggttgcgtccataggggttagcatttcttttgactttgggaatccaaatgcaatcaccattaggcacatagaatctcctagcatagcattttaaagatgtgtgcccattcttcatacaatagttgcaagtgacagattttgaagttttcccaaaaccagagtatttgttgactcttgagttcttttccacttttgattcttctgttttgaaggtacaaaaactgtttttccatatgattttgaaccatgtttatactccaaaccagaagtatctccagcatacttttgcacactcaacatttcagccaagttgcattttcctttataaaactttctcaagaggtcaatcaaataactgttattggataagagcaaaatatacttttcaccttgactttgtttgtactcatcaaaatccttttgcagcatattatacttgtcaacattgctagaagaagtggcacacacacatccatttaatttgtaacttgaaacaagtttttcattttcttccttcaagttgcaaatttcattttgtaaatcagttattttctcaatgtgccatctaagatttcctttgagcttattattggattttgcaagtttttgggcttcctcatacatttattgaaaagcatgaatagcttggtcaagttcagaatttacctcacttccttcacttagcaaatcatcatcatcttcattgatggtggaggtaagacacatgtttgcttcttcattttctgtgaaagaatctgaagatgttgactcattatcctcccaagctatgtatgccctctttccttttccttcctttttcatcttgctctcagcttgttgcttcctcaagtagattgcacattcagatttgatgtgacccggtttgccacactcagcatgtgaaattgttgtcaatcttcttgttgaggttgttgttgatgttgctgtttttgttacctttggtgaatctcttattcttgtttttcctcagaaatttgctgaaccttttgaccaccaagttcacattgtcctcatcatcttcttcacttgattcatcctctttttcagctttcaaagttgcagctttcaaggctatgcttcttgttttcttttctgcatcctcacaagatgttaattgagacatttctaattcatattcaagaagcttaccaaacaatgcagccatggacatttttgacaaatccttggaatccttgattgctgtaacctttggttgccaaggtcttgttaagcacttcaatattttgatgtttagctcttcagtgtcaaagacctttccaagacccaatagatgatttacaatgtgagtaaatctagtttgcagctgggagatgctttcattggaattcatcttgaacatttcgtactcatggatcaaatcatgcttccttgatcttctaacttcctcagttccttcatgagtgatttccagcatctcccacatctcttttgcacttgtgcatctcacagtcctgaaaaattcatcagaggaaagtgcagaggtgatcatatttttagctttaaaatcatattggactactctttgttcagcctcagtcatctcatcccattctttgggaatcaactcatttgcaacagttttctttggaataaagggacccttctcaatagcattccatgctcctgggtcatttgattgaataaagatctttattctattttttcaaaaactgaagtgttccccttcaaacattggaggtctgtttaaagaggcaccctccttaaaggttatatgagaagtattcatgtttctttttgaaaagaaaaagtgatcttgaaattccttaataatcgattaaacacgctcctgtaatcaattatttaccatttgtaatcgattaaatgaagactgtaatcgattaaaatgctcctaataatttctgggtttgggctatgaacaatataattgattattccgtgaggtaatcggttaaaccagtcagtcatacattctaaatgagcttagtaatcgattaatacgatatgtaatcgattaaggcagtgagctatgttttttctaagtctatatgcataggcttgtaatcgattaccaactctatgtaatcgattaagacagagagttccatttttcataaaaagtcttagtaatcgattaaaccgatatgtaatcgattacaatgatcatgatttgttttctaaaggcacgaagaacaaaataatcgattccagtatatgtataatcaattacttcagtaaaactttgtttttccaaaaacttaaccttttaaatgccttagttatatattgcctttgattaaaccttttaatctaatgatcctaaatgaatgattaatgcatgatgtgcacaattggattatcagatcatatacttccttttacaattaatcaaattggtcttcaatgctttccatggacctttgcctttgtgcatgttgaaagcacaaaacttttgaacctttgattcttgttcattgatgtttggcttcacttgaatcaacagggatcaatgttgcaaaaaggtgttgagattgatgaagatgtaaatcatagaattagagcagggtggatgaaatggtggagtgcattgggatttttgtgtgaccgcaaaattcctcttaagctgaaaggaaaattctatagaatagttgtaagaacgacaatgttatatggagcggaatgttggccaacacataggcaatatgagcataaaataggggtagaagaaatgaggatgttaaggtcgatgtatggatatacgaagatggataagataagaattgaggatattcgaagaaaggtatcagtggtaccggtatgtgaaaagatgaggaagcagagattgaggtggtttgggtacgttatgagacgactactagatgctctcgtaagaacaagagtttgttaccaagagctcgacacaaagagaggtagaggtcgatcgaaacttacctggggaaaggtagttaaacaagacctaatggagtgagatatagattagtggacggtatgtcttaggacggagtggagaaaagctataagcttgatggagggttaaacccattagtagttctatgttccagtcattcccttattttaattattttcctcttcttttctcccttcttccttttcacccttttttctctcttttgtcttatttccacttttttcttcccctctctcttttgtcttattcacagcagaaaactgagttttaggtgtggtgctaatcgcgccaggtcttttggatgtggcgctgacggcgccaggatggcgcgagtggcgccagaggttcggccagttcatgctgagagcgtggccatggcgctgataacatgggttattcgagaggttggcgcggatggcgccaagtgccacgcgggtcgcgccacaagtggcctggaaaaccaatttcctctggattttcatgcagatagcgtcagaggtggcgcgggtagcgccaaaggtctcgaaaggttcacgtggttagggccagtccaccgccattgtggcgcgggtagcgcgggaggtggcgcggatggcgccagacttcgggcaggctgagtatataaggggcagaacgcgaaaatggagggggagagtgagttttcttcttccttggacctgcaacctccattaatggcagttccaagctttctgggaccctatatactagtctaaacaccttcgtgagatctataaccttgttagaaccgattagaaagctgaaatccttcatttgtgttcttgaaacccctttgtgagtgagaatttgattctcaagtgagaaacctcagagaacttgaggataggcgagaactaaggcgggagacagacatcatagcttaaggaagctgttctgaggtctccttggttgctactgaggtaagaaacctgaattctcttgattctctgtgaatttgggattccctgagtaatatgacccacagtgagatgaggctagaattagcccagggtcctgtagagaaacttattcagggcaacgaatagatgaaggaatagctttcagtttttgtttctgatgactttgaatcttggctctgtgttgcctgtgtagcctgtgtgatggttacttgtgattgtctgttgacatgccagagccttagtgagatttatgttgagcctgagaggctagtggaatgagactttgagtggaacccagtccattctgatgataattgagtttaagactgagaaaagctagaccatgtgtgtatgttaagagtctgggatgacttagatggcttgtatgtagcctgagggaccttgaacaatggccaagcttactaaaaatgagaaaggatgtaaaattatttcaataagaagtgaccatggtggtgaatttcaaaatgaactttttgaaaaattctttgaggaaaatggaattaaccacaatttttcagctccaagaacaccccagcaaaatggtgttgtggaggctctgtagccttgtataggctgagagggatcctgttgacgatcagataatcacttgtacattgattagtttatgtttatagaaaggatgagagttccctttcgcttgaacggtctagaaccgtatctgatatattatatgcttgttcttgtgtaggacgtgagcgtgagagctctggtggtgttgaccacgaggccgggagagccggtgatctgtctagagcaggtaagctcttggttcttgtttgtgtatcctcggctgcgttccaccatatatccactgggattatggttatgatatatgtttaagctagtagaggaacgtgtataatgatgtgaatgattggtagatgtggtctgaaccctataaaagggtagctgatactttataattgatctgagcccagagaatgggtgattatgatgtgtatagctatgagttgtgaatgatgtctcaaccctgtaaaagggtaattgatgcttgacatttgatctgaacccagagatgggtgattattatgtatggccatgaattgtgattgatgtgtatttgatccctaaaaagggaattgaggtgtatttgctccctgaaagggaattgatatgcacttgatccctgagaaagggaaattgatgtatagggctatgattcattgatagcatgccttattgattataacacttgattgagtatgcatgtatataaatgttgtgtactgatgttctgatccctatgagagggagattgagatgtattgatctgatatgcctgaaatgtgcactgaaccctgggataggggattgatatgcatagctatgatgtgattgaattttggcatgtcgggttgaatgtgaaacctgattatgcatgctgtgcttgaatagtattctattgtcgtaggatagatgatttgagattgagtaagacctggtgagagatgagcctgtgatatggaggtagcctcctacgtggagatgttcccatatgcacagaggtagcctcctcaggcaattgtattgtgttagaggatgagatggccctgtgatacatagaggtagcctcgtgataagagatgtacctattttcacagaggtggcttcaccaaaaaggggatgtacctgatatatagacgaatcctcgagatagagatgtacctatatattcagaggaagcctccgctagggatacatgcaggagatgtgccgagtatatagaggtagcctccctgtgaggagatgttcctatatacttagatgtagcctctgcatgacagttattgatgtgatgaatggctgtatgccatgattatgccttggttttggctgatggatgtgaatagcctgattgcagtcaggtgtattgtgcatgatgattgattgagtgattcactgatgatgattgtgattgtggttgatatatatgtatgtgttgtcagtgaaccaggggaaggaaataccttcaagggccctgagtttactgagattttatatctcaccccttgtgtggggctatgttttgcaggtgattcttcccgagtaggagatagatcccaaggcaagaagcctatgcaggattagctgctgatagacaccttaggctagagaacatgagcttttgctctgatgctttgtatttagcctttggttttgtattttgatgtacctttatgggattctgtatagttttgtattgtacagagagactttgatgtatattcaccatattatagtgtacaatgttatacagatgacatttgatgatgtcacttttagtatatgcttccaaactgcttaaactctgattgattatctgcttgattgtgatttgtgtttggtaatgaccctgattagtggatcggggcgttacaaaaacaccttatgagctatacaaaggaagaaagcctaatgtttctcatttaaaagtttttggcagcaagtgttttatactaaacaatgggatagaatcacttggaaaatttgatgctaaggcagatgaagcaattttcctaggatactcattacatagcaaggcatatagagtattcaataaaagaacaatgtgcattgaagaattagtacatgtaatttgtgattaaactaatccctctaaggaggaaaaagagttggataatgatgcaggtcagctggaagaaataattcaaataggcaatcccttaaccaaaattgaagaacctataactgaaacagaatccacaactcctgtaccaatgcctaaggattggagaacaacaagaaatctatcacttgacaacataataggtgaagtttcaaagggagtatctactagatcctcattaaaaaacctatgttgtgatatggcttttgtttctcaaattgagcctaagaacattgatcaagccttgaatgatgaacattggatgcatgccatgaatgaagagcttaatcagtttaagaggaatgatgtttgggaattagttcctagaccttcatctcttaaacccattggcacaaaatggattttcagaaataagcttgatgagagtggaatcatagtcagaaataaagctagattggttgataaaggctataaccaagaggaaggcatagactatgaggaaaatttttctccagttgcaagattggaagcaatcaggttattacttgcatatgcatgtctcatggatttcaaactttttcaaatggatgttaaaagtgcttttttaaatggatacattgaggaggacatatatgttgaacaacctcctggttttaaagatttccaaattatgtttacaaactgaaaaaggcactttatggtttgaaacaagctccaaggcaatggtatgagaggttaagcaaatttctgcttgaacaatcttttacaaggggcactgttgataaaaccttgtttatcaaaaggcttggcaatgatttcttactggttcaaataaatgtggatgatattttatttggttctactaatcacaagttatgcaaagatttttcatcagcaatgcagaaagaatttgaaatgtcaatgatgtgtgaacttacattcttccttggacttcaagtaaaacaaatgaagaatggaacctttctcaaccaatccaagtactgtcttgagattatcaagaaatttgagatggagaagagcaaagatgctgcaactctcatggctacatcaacatatcttgatacagatgaaagtgggaagaaagttgatgagtcaaagtacagaggaatgattggatcattgttatacttgacagctagcagacctgacatcatgctcagtgtttgtttgtgtgctagatatcaagccaatcctaaggaatcacatctaactgttgtcaagagaattctgaaatatctcaacgctacaccaagagttggtctttggtatcgaaaaggtgcttctttaaatatcattggttattctgattctgattttgcaggttgcaaattagataggaaaaacacaagtggcacttgtcatatgctaggaggctcattgatctcatggcattgcaagaagcaaccatgtgtagcactttccactgctgaagctgaatacatctcggctggaagttgttgtgcacaaagcttgtggcttaaacaacaaatgctggattatggagtggaactgaatgctatacctctgctatgtgacaatacaagtgctatcaacatatcaaagaatccaataatacactctagaacaaagcatattgagataagacatcattttctcagggatcaagttcaaaaaggttacataaaggtagaattcattgacaccaatcattaactagctgatatattcacaaaaccattatctagagatagattttatacacttagaaacatgctagggattcttgatgaaagcaacattatctagcttgattatatgtgtttctatgtgatgattgaaagcctaaatgtcactaaatgcttaagtatatgtatcattgtcaaaaagctgctaaaatgctctatatctgatattttatctgtagtaatcgattacaccacgggttaatcgattaaattcattaaaaatcaagtctggaacgaaatttgcatacatgtaatcgattacattagaatggtaatcgattattcttcacataaccaaaaatcacttttctctggaataatcgattacgtatcgggataatcgattacaatgttctaaattcaaaaacttcaagcatgtctctctagaataatcgattacttattagctgtaatcgattaccattcatattgcaataatgctcactctgtgataatcgattaccactcaggataatcgattacctatggtcttgatacttagataactgattcaagctgtaaaataatcgattacttaagcaaagaatcgattacaggtcatcttcaacctctgaacaagagtaaaataatcgattacgtatgaaaataatcgattaccacgtgtttgtaggaagcctaattgaactggaataatcgattacattacgaaataatcgattattcatgctgttgtttgaaatctgacaggtttttatggttaataaaactgcccaatccgttttaaaaccaacacccaatgtcattaaaccgtcccaactactataatttttaaatttgtgaatgttaggagcccaatctttgcttataaatagtgatctaaaggcttggtgcactacacctaaccatttctgtccttctgcatattcttctacactttcttctttgtgtctaaaattctgtctaagcctacctgagaaacatgtctgagcctgcttccaaaagaattaggaaaccaaagaggagacatggtgaatcctcttgtcaacctcaacctcaaccacaacccattgataggcttgatatctggttctcgtctgagacagataaaatcaattacctccaattcaatgctactaagcttgtggccacccccaaatacatagaattagactggtttattaggcaaggattccaattcccagactatctagagtcacaaagccttaggaggtttctagagatgaagggtaccttctacccttatctagttcgagttttttacacctacttgaagggttcaatgcagggtgacatgaggtccaaggtaaaaggggtaaccatgcacatcacccctgcaatttgggaatcagtaggtggaattgtctgtgagggagctcgcagatttgatgaagatcctgatgggtacagtaagatggatatctacaggagcatgcttcatgacccacacataaggcttaggaccaggcttggcacaggtccaatgatagcagaagataggatgctgcactatctaatcacatacatcatcaccccaaggccaagcaaccatgcctaagcaactgatgaagatcttcagttggtatatgggttgaagaaccatattcccatgaattaggctctgatctttgaagagattatgctgaaatcaaaaaggttggttaactacccattcccctatcctgtttttgtttcaaggctcatagatcatttcaacatagatgttgaaaatgaagttgtagacaacactctctcctacaacagtcaaattaaggagaaacatctaaccaagatgggcatgaggaagacacccaatggctgggtaatggctgcccaaattggtgctgctgagcaaggggagatggctgcagattctgagaatgaaggacaacaagaacaaccacagcaaccccagcaagctttctcagattttgaatcacttatgattcaaaagatggactctcttttgaagctacaagaggacttcaaggctgaaactcatgaagccttagaagatattagggaaaggctggaggctattgaaactaacatggatgatagagcctctgcagaattctaggatttttagtttatgttttttcttagtttatatttagttatatttttggttgtaatagacaatgttatgttctgttttattttataatttgctttatgtactgcctcatatggtaatcctattaatgcattatgcaattccagtataaaatctgttgtgcctgctttatttttgacttttaacaagccaaatagggggagaattgattaagggggagtagtttgatatgtactctattcatccctgttttttgattcaatttttgcccagaaattgatttgaatgaatgctggaatttagggggagttaatgtgaaaaactgaacataatacaatggtataatgcttaattgaatgcctcatgagcaaacatgtgctttaacacttgtttttggcaagattgtttgaaagtttccaggtttataaagcttgttcaaacagtggcttttcaaattgatctccaagtacttatgcttaatcaaatggaagatttggcatgtttaaagccaaaaagggggagattgttgattcaagtgaagccaagcataaatgaacagaagatcaagcttcaaggttttggactttcaaacatgctcaaatgaaagcttgaagaatcaatttgatcaattgtaaaaggaagtatatgatctgataatccaattgtgcacatcatgtattaatcattcatttaggatcattagattaattgattaagtaaaagaaattcattagaaaggcacttaggaagcaaagtttttggaaaaataaagttgcatatttaataatcgattgcaagaatagtgtcatcgattattttgttcttcgtgccctttagaaaacaaatcatgatcattgtaatcgattacatatcggtttaatcgattactaaggcttttatgcaagatacaactctctgtcttaatcgattacataaaattggtaatcgattacaagcctatacaagcagacttagaaaaatcacatcgccttgtcttaatcgattacacatcatgataatcgattacaaaggatcacatgcataatagaagaatcacaactcactgtcataatcgattacaaagctcatttagaaaaacatgtctgactggtttaatcgattacttcacggaataatcgattatattgttcatagcctaaacccagaaactattaggagcattttaatcaaatacagtcttaatttaatcgattacaaatgataaataatcgattacaggagcgtgtttaatcgattattttcagttataaatctgttataaatagaacccacttctctgaagtttgtaacttttgataatatgtattctgggctttcacaaacattctgagctttcattagtgagtttctctgagttctaaatacacttagcttcacaaaattcatatgggtttttgattcaagaaggtgaagcctcattcattcaaagcataaggaaaggactgcatatgtgattgtaatctgtctttcaacctgagaatcattcattgtgcattcattcttggattatcaggtgatagctttccttattctttgaagatgtaatctgttctttgaatttttgtaaggattagtctattgtaattggttttcttgcaagaggagataatgtttctctaaaagacagctgagtagtgttcttagtgtgggttttggtctctaagggtctaatagggttttagacttctgaactttatctagggttgataaagagaggcttgtaatttgcttgtaagaatattttttttgcaatagtggaactctactctagtgttgagtagaagaactggatgtagcctcatagggtttgaggtgaaccagtataaaaatatgtgactaatctttcttctcacctattcatctcttaatttctttgtttgtgaatcaatttcattgcacagaagattatcctctgttttatattgttcttgaaaagggaagttgattgaatattgattcttggtttttagaaaaaaatttaagtgataaagatccttggtaaactttgattttaaaatttttaaaggggaagattcaaccaattcaccccccctcttggttgttttgaggtattctattcattttcaggtttgctatatgaggttaaacaatttctctcgaagaacttcgataaaggatatgggtgatgccacttacgttattggcatcaagagacagggtaagaggtgttcttggtttgtctcaagagacctatattaacaaagttttggaaagatttagaatgagtgattgttcaccaagtgtagctcccattgtgaagggtggcatgtttgatttaagccagtgcctaaaaaatgatcttgagcggtaacaaatgaagaacattccttatgctttagttgttggaagccttatgtatgctcaagtctacacaagacctgacattgcttttgcggttggagtgttaaggaggtatcaaagtaacccaagtttagaccgctagaaagttgcaaagaaagtgattagatacctttaggaaactaaggtctacatgcttatgtacagacgaattgacaacttggaagtaattgactacttagattcagactacactggctatgttgattcgagaaaatagacttcggaatatatttttatgctagtcagtggagctgtgtcttggataattgtcaagcagacattgactgctacttccactatggaggctgagttcgtttcttgctttgaagctacctcacatggtgtatgaatgaggagtttcacttctaagcttagagttacggattccatttctacgccattgaagatatactatgataattcaactgttatttttatggctaagaataacaaaagttgtagtagaagcaagcacatcaacattaagtatctagctataagagaacgtgctaaagataatacaacggttattgagcaaattagcactgaattaatggttgtcaatcctttatttaagggcatgccaccatttaaatttaaggatcatgtggaaggatgagacttggttcccatatgtgattttcattgtaagaatgatactaagaaactctattgtgatgtttttcattcagtttatgcgcatctaaagttatttattctaagaaacatcaattaagtttagacctagaataaacattggatttattcattaagttgtatgggcttgagaaatataatgcaatgtaatacgtggaagataatactcgtatatattagaggaactatcgccgtgattcatgtagtttatttctcactaaaatgtatgatgagatatgtggaccaagtgggagaatgttggttattttctgttgcttgactaagtcaaaaccacataagttgttgttgatcttatcccttattttcagccactatgctcacattttatacataagaaaaacaacctctttgatgggaagaggttataaaaagatatgtgcaccatgaccaaggtctctatgcttgctatctgaaaaatctcaatacaccatcagtgagtgatagtgaaagcatagaagacccttaatccaaaagttagattagtttgaagcctcaaactatttacagattacttgagtcacagacaactataatttcatcttcggaacaaacaataatagcaatgtcaggaggtatttgtgatcttaattttttttctgcatttgatctaatagcttctgatgtatataagcgtgattagatcatttagtttttcttacagtgaaaacaataggaatacccacaataaccaacagaggggtgaattggttagatcttagtaattaaaaaaaattgtttatctataaaatcagagttaaaggatcttcatcacttttaaaccaaggatacttttaatcaatcaaatcactcaacttaagaaatcaatagctcaaaacagaacttgttgagtaatgataatgatgtcaagaaaaaatgaataagataactgataaagatgaaggaatagaaaagcaactcaagaatttatactggttcacttctcaaaaaaagctacatccagtttcttctaatcaacactagattagagttctattataaatttcagttcttacaagctttacagcaaactctctttatcaacactagataaagaatagaaatctaaaaccctattagacttctactgagcaagagttagagaccactactttgttcttccctagagaacactactctagcacaagcttcaaagaacccctttacaatagcatcaaataacaaacattacaaaaacgaatttacaaccaaagataatggagagaaacaacctgatgatccaataatgaatgcatgtgagttaccaatcaaagttgaatgcataaaatgaatttcagaacatgctctccattactcttttgaaatatcttgcccaagaaatcattcaatacccatgaatattaaagagtgggacaagagcttagttaacccagaaaatcactttcaaactcttagaaggcttgtgtgtattcaaaaaattcaaagtgttcaagcttttttcaagccaagccttctttctatttataacagctttttgtaacaacttgtaatcgattacacgctccaaataatcgattaaaatgacttatgtgatcgattaaattgtcacttaattgattaaagtgttcaaggctccattatgggtttcacaacgaacaaaataatcgattaacccgagctgaaatcgattaaatcagagaagttttatttaagaaacagcttgtgtaatcgattacattttatggtaatcgattaaagcagtgaagcaagctttttcaaatagcttatgtaatcgattacaaataacagtaatcgattaacacaataatgcacaatattcattttatactatgtaattggttacaagagttgtgtaattgattaatatgttcatcaaagcttttctagttttaaacataaaccaaataattgattaatccgttgtgtaattgattaaaacagtgtaattacatttttccaaaaacattactcaattaaatcctttttcaaagtgtgagtagctttgatattttaatgaaaacatttaagcatgttaatgattaggtgcatgcaatgcaaggatcaaaagattagcctctcatacacatcatttgaattacaatcttcaaggcatgtgaaaagctcaaaacattattctaagtcataggtttcattcttcttgttgctccccctatatccaacaatctccccctttttggctttgaacatgccaaatatttgattgaccatgtgtttgatttttgaagtagtttgagggatgaaaatagaagtcttgaactttgttaacctgaaaacaaatcagcctctttgccaagaacaagtgttaagagatatgcctgcataaacattaatcattaactttcattagttgctcccttatacttagtttgttccccttacttagataaattcatcagttttttatttgtaaaacacataatagagaacaaaatagagtatgcttgctttttagatatcaattaatatatttctacccctatttggcttatcaaagacaaaaagatagcatagcaaataatgagaaggagaaaataaaacttcattaattggaaagggaaggacagtacattaatcagagaaaagacaaaaaaaaagagtaaagcaataagaggaaatacaagaaacctaagctagtttatcaaaatcataaaggacaagcctagcttctatgttctctagcctatatttcatctcatccaaagatgaattagtctcagccctgtgctcatgatgtagggacaataaggcatccatcttttgaatcatgagagattcaaatggactgtaagatggttgagcagagccttcatcttcagcctcttcatcagcttcttcttcatttccagcagcagggatttgttggccaaccatttgccatccatgaggggttttgaccatcccaagcttggtgagatgtttctctttgatgaggctattgctggagtttgtgttgtcaacaacctcattagagacatctatattaaagtaatcaataaacctggaaacaagaacagcatatggaaaagggtaattcatcaacctcttggatttaagtataatctcctaaagaatgagaatccaattcatctgaatggaattcttcatgtcatacacaatttgtatgtcatcatcagtggcttgggcatgattggtggatcttggggtcaagatataggtgattatgtaatgaagaagtttgtcttcatgggtcattgggccagtgcttagcctaagcttcaacctcatttggggatcaagaagcatccccctataagtttccaccctattataacccccagcctcttcttcaaatttcctttctccttcaaaggaaataccagcaacaacttcttagacctcaggagtaatttccatggctactccattaacttggacagaagtgttccatccatagaagccttagctcaggtgtagaacaccttcactaattcagggtaaaaggtacccttcatctcaataaactttctcaaaccctaggtttcaatcaaggcagagaattgaaaaccctccccaatgaactagttaaggtcaaggtgtttgggaggacaaataagtttggtggcattgaactgaagtaatgtcattttgtctctctcagtaggaaccaatgatctaacctattgacagtagggttagaggtttcagcactctttctcttagaggatttggttctcttaggggcagacatattcaacatgggagaaaaggctacaggacaaggtttctggactcagaggaagaaagagaaacacagtagtgcttaagatggtgtgatttctcctttgaacataggctatacttatagaagaatttgggcttcaaagttcaaatttgaaatcagtaacagttattttcgaattaacccactaacattaaagcacaaaagattcaaatttgaattaggtggcagttgggcagttataatttccaagaaaatcctgcagattttgcagtaactccatgaataattgattatatgtttatgtaatcgattaattcgtaagcaaaatcaatttctgcagaagctgtaatcgattaatttgtcaagtaatcaattattttagtgaaattcagttagagaagatgaagtgtaatcgattatttctcttatgtaatcgattactacagggagaatccgagtttcaaacaatttttcaatcaatttaattgattaccattcactgtaatcgattattccagtgaattgaatttttgtaaaagaatttttaagctatgtaatcgattaattcaatggcttaatcgattattccagagaaaaacatattctggaaatatttcatatgaagaataatcaattatcctggttatgtaatcgattacataagtataaatttcattctaagtcttgtttcaagttcatttaatcgattaatacgtgctttaatcgattattccagtagcaatatcagattcaacagtattcatgcagcatatttcaaattttgagagtacatgtgatgattgatcaagtatgaagctatttccaatgaataagcacaaggaaaacatgctagcaaatgttagactcatcaaggatacctagcatatttctaagagtatagaatctatctctagccaaaggtttagtgaatatatcagctaattgatgatgagtatcaatgaattcaattttgatgttacctttttggatatgatctctaaggaagtgatgtcttatctcaatgtgtttggtccttgagtgcattattggattcttggaaatgttgatggcacttgtgttgtcacatagcagaggaatttcctttaattctacaccaaaatcttgcaattgttgttttaaccaaagattttgaccacaacaacttccagcagagatatactcagcttcagctattgacaaagcaacataagattgcttcttgcaatgccaagatattagtgagctgcctagtaggtgacaagttccactagtgctttttttatccaatttataccctgcaaagtcagaatcataatatcctactaaattaagtgatgcacctttaggataccaaagaccaagttttggtgttgatttgagatatttgaggaacccttttgactgcagtgaggtgtgattctatgggatttacttgatatcttacacacaagcacacactcaacataatatctggtctactagttgtcaaatacagtaaggatccaatcattcctctaaatcttgactcatcaactttctttcctttttcatctgaatcaagataagttgatgttgccattggggttgcagcatatttgcttttatccatttcaaacttcttaatcacttcaaggcaatacttggtctaatttagaaatgtctcattcttcatttgcttcacttggagtccaagaaagaatattaactcccccatcattaatatttcaaactcattctgcatagagatagaaaactctttgcatagcaattgattagttgaaccaaaaattatatcatcaacatacacttgaactaataagatatcattgctttgccttttgatgaacaatgttttatcaacatgtcctattgtgaaagattattcaagcaaaaatttacttaatctttcataccaagaccttggagtttgttttaaaccataaagagctttcttaagtttgaaaatatggtttggatatttaaaatctacaaaactaggaggttgctccacatagatttcctcctcaatatatccatttaagaaagcacttttaacatccatttgaaaaagtttaaaatccattaaacatgcatatgcaagtaataatctaatggcttccaatcttgcaactggtgcatgggtttgcttatagtcaataccttcctcttggttgtaaccttttgcaaccaatctagctttgtttctaactatgattccattctcatcaagtttgtttctaaaaacccatttagtgccaataggtttgagagaagaaggtctaggaaaaagttcccaaacttcatttctcttaaattgattcaattcatcatgcatggcatgcatccaatgttcatcaattaaggcttgatcaatgttcttaggttctatttgtgaaacaaaagccatattacagcagagatttttcaatgatgatctaatagatattccctttgtgtaacgccccaattcactaatcagggtcattaccaaacacacattataatcaagcagataaccaatcagagtttaagtagtttggaagcataactatgagtgacatcatcaaatgtcatctgtcatcaacactgtacactataatatggtgaatatacataaaagtttctatgtacaatacaaaactatacaaatatcccctcagggtacatcaaaatctataacaaaacaaaatacaaacatctgagccacaagctcatgtcctctagcctaaggtgttaatcagcagctaatcctgcataggcttcttgccttgggatctctctgctactctagaagaatcacctgcaaaacatagccccacacaaggggtgagatataaaatctcagtaaactcagggcccttgaaggtatttccttcccctggttcactgacaacacacatatatatatatagatatatcaaccacaatcacaatcatcatcagtgaatcactcaatcaatcatcatgcacaatacacatgaccacactcaggctatacacatccatcagccaaaaccaaggcatactcatggcataaagccattcatcacatcaataactgtcatgcagaggctacatcatagtatataggaacatctcctcacaggaaggctacctctatatactcggcacatctcctgcatgtatccctagaggaggcttcctctagatatataggtacgtctctatctcacgaggctcatctatatatcaggtacatctcctttttggtgaggctacctctgtatacataggtacatctcttatcatgaggctacctctatgtatcacagggtcatctcatcctctaatacaatacaattgcctggggaggctacctctgtgtatatgggaacatctccacgtaggaggctacctccatatcacaggctcatctctcaccaggtcttactcaatctcaaatcatctatcctacgacaataggatgctattcaagcacagcatgcataatcaggattcacattcaaccagacatgccactattcaatcacatcatagccatgcatatcaatcccctatcacagggttcagttcacatttcaggcatatcagatcaattcacagccattaccctctcatagggcacaaacatcagtacacaacatctatatacatgcatactcaagtgtcataatcaataaggcatgctatcaatgaatcatagtcatatacaacaatttccctttctcagggattaaatacacatcacttccctttatcagggtcaattacacatcaattccctttcagggatcaaatacaccttagtttcctttctcagggatcaaatcatcaatcacaattcatagccatacatcataattacccatctctgggttcagatcaaatgtcaagcatcaattaccctttcataaggttcagacaacatctaccatttattcacagcattatacacattcctctactagtctatacacctatcataaccataatcccagtggatatatggtggaacgcagcagaggatacacaaacaagaaccaagagcttacctgctctagacagctcaccggctctcccggcctcgtggtcaacaccaccagagctctcacgctcacgtcctacacaagaacaagtatataacatatcagatacggttctagaccgttccagcaaaagggaactctcatcctttctataaacataaactaatcactttacaagtgatcatctgatcctcaataggatctctctcagcctatacaaggctacagagcctccaccaagactctaatcaagctatggtcaagcatatctctgcttacaatatcctaaaatcaacttctccttatcatcagtttcaactcacaaacatcatctatatagtctcatgagcaactttgtcaactgctctagggtccagactagtcaactagtcaaccttttatctctactcagactgactcagagcaaaaatcaaacttcatcaataatgatgattcaaggctctaaattcatcataacagtcctctgagcataagactctacagagtccgagcctaataatggctctaacacatccaaaatcacccctcaagctaaccccaaaaccctgaaatccaatacacagaaccaacagttagagctcgagttccttacctctgtgaagtccagaaacaccagggaatcactttccctaaggtaactcgctcaatcaaggcctatttcgcctctgggtctcaagctctcaggggttctctcagagaatcaatctcactgtttctcgctctttctcgagaatcaatcggggtttttctctcctctcggggctctgatcactttctcagttgggtccgaggtgtttagatgagagatgggtaagatatgaagctctcaaaatgtatcaatggaggtttggacgaaggaggaagaagaaaggaagagaaatgccaaagtttttgagcttctgggccttttataggcctctgccgtgactcccacgctccaagcgtgggctcccacgccccaagcgtggcttcccagacaaaattccatttctgggccacttcccacgccccaggcatggcctccacgccccaagcgtggacctcccacgccccaagtgtggacctccagtgaaaaacaactttctggagcacttcccacgctccaggcgtggcctcccacgctccaggcgtggcatgcagaattagcctatgtacccctgatagtacacaggcttgttggcgtagtcccttctgttctgtttaatctctgctatgaattcccttgctgatcgcacagggtctagcgtcaaccgcgccatgccttagggttatcacactttgaaacttcaccaatgatattgtcaagggagagatctcttgtagttctccaatcttttggctcttggactagtgttgattgtttagcatcagcaattggttcttctttttctttatccattgaatcattaagttgaatgaactcctccaaaggacctacatcaatatcacactttttttcctccttggagggattatattcatcacaaataacatgtactgattcttccatgcacaaggttcttttattgaaaactctatatgctttgctatgtaatgaatatccaagaaagatggcttcatcagctttagcatcaaattttccaagtgattctttaccattatttaaaacaaagcacttgcagccaaatactcctaaatgagaaatatttggttttctacctttgtatagttcataaggggttttctttaacataggccttaatagcaatctattcaaagtgtagccaattgtacttacagcatcagcccaaaaatgtttaggcaaatttgtctcattaataagagtttttgcacccttttcaagggatctatttttcctctccacaacaccattttgttggggtgttcttggagctgaaaaattgtggttgattccattttcttcacagaatttttcaaaatgttcattttggaattctccatcatgatcaattcttattgagataattttgctccccttttcattttgagcaagtttggccaattttctaaaagcattaaaagcatcactcttggattttaaaaacaaaatccatgtgaacctagagtaatcatcaacaatgacaagtctatagtaattatctcctaaactcatagttctagaaagaccaaacaaatctttgtgaagtaattcaagagatcttgaggtagaaacaacatttttactttgaaaagaattttttgtttgtttccccttttgacaagcatcacataatttctccttttcaaacttgagtttgggtaagccactgactaaatcctttttaatcagcttgttcatatgatgcttgttaatgtgacttgcccttctatgccatagccaagattcatcaattttacctattaggcaagaagtgttgtgaaaggatgcatgatctatggagagtaaataaatattaccttttctcttacctatatgaatcacctgaccattttgtccatcacatatcatgcagcaactgtcattaaatgacactttgaaccctttatcacaaagttggcttatacttaggagattgtgctttaaaccttccacataaagaacatttctgatcatggttttgaagttgtctcctatgtttccttctccaattatcttccttttgttgttgtctccatatgtgacaaatccaccatctttaagagtcaaatttgtgagcattgatatgtcaccagtcatatgtctagagcattcactatcaagataccataatgaagatcttgttcttagacatacctccaaaattcaaatcaatttatagaggaaggtacccaattgagattgggtccataggggttagctattctccttttcttcggtacccaaatgcattctccatttggcacatagaatctcctagcatagcatttattagatgtgtgacctttcttaatacaatacttacaagttactgtttttgatgctctttcaaaataagtcatgtgattaaaccttggttttgagacagctttttgatatttctgttttggatgcacaaacttggttttttcataaggttttgatccatgtttgtaacccaatccagaagtatctccaacatatttttgcacacttagcatttcagccaagttgcattttcctttataaagccttttcaagagatcaaccaagtacttattttctgaaagtactaccatatgcttttcaccttgactttttttgaactcatcaaactctttttgcaaatcattgtatttgttaacattagatgaagaagcacatacacatccattcattttgtaacttgaaacaagtttttcattctcttctttcaagttacaaatctcagtttgcaattttacaatttttgtgacatgccatctaagatttccttttagcctattattggattttgccagcttttgagcctcatcatgcatttctagaaaagcatcaacaacttgatcaaattcagaacttacctcagtttcaacacttgaggattcatcatcttcatttattgtggaagtgagacacacatttgcttcttccttttcagttgataattcagaagttgctgactcattgtcttcccaagctatgtaggctctcttaagctttccttctttatttatcttgctttcaccttgttgctttttcaaaaagatagaacatttagatttaatgtggccaggcttaccacattcaaagcaagtgaaattgttgtcactccttttgttgttattctttgcgaactttttgttcttgtctcttctcaagaacttgctgacctttttgacaattagattcatcttgtcctcttcatcttcttcacttgagtcttccatccttgaggatgcagctttcaaggctatgcttttttgtttcttttctgcatcttctgcattggttagttgtgacatttcaagttcatactcaagaagcttaccaaaaagtgcagccatggacattttggatagatcttttgattctttgattgctgtcacctttggttgccatggtcttgtgagacacttcaagattttgatgtttaactcttcagtatcaaagatctttccaagaccaagaagatgattaactatatgagtgaatcttgtttgaagctgagatatgctttcaatgatgttgatcctgaacatttcatactcatggattaaggcatgttttcttaatcttcttacttcatctgtaccttcatgagttatctccagcatttcccatatctcctttgcacttgtgcacctaacagttctaaagaattcattaaaggaaagtgcggaagtaatcatattcttagtttaaaatcatattggacaactctattttcagcatctgtcatttcatcccattctttgggaatcatatcattaccaacagtttttataggaataacaggacctttttcaataacattccaagcacctgggtcatttgattgaataaagattttcattctatttttccaaaaactgaagtgctctccttcaaacattggaggacggttgagggaggcaccttccttgaaggtaatttgtgtggtattcattttcttttaaagaaagatagtgatcttgaataaccctcaagaacatgctcttgataccaattgaaaacaataggaatacccacaataaccaagagggggttaaattggttagatcttagtatttaaaaaaaaattgtttatctataaaatcatagttaaaggatcttcatcacttttaaaccaagaatacttttaatcaatcaaatcattcagctcaagaaatcaatagctcaaaacagagcttgttgagtaatgataatgatgccaagaacaaatgaataagataactaataaagatgaaggaatagaaaagcaactcaagaatttatactggttcacttctcaaaagaatttacatccactttcttctaatcaacactagattaaagttctactattataattccagttcttacaagctttacaacaaactctctttatcaacattagataaagaataaaaatctaaaaccctattagacttctagtgagcaagaaccagagaacagtactctattcttccctagagaacactactctagcacaagcttcaaagaacccctttacaatagcatcaaataacaaacattacaaaaacgaatttacaaccaaagataatggagagaaacaacctgatgatccaataatgaatgcatgtgagttaccaatcaaagttgaatgcataaaatgaatttcagaacatgctctccattactcttttgaaatctcttgcccaagaaatcattcaatacccatgaagattaaagagtgggacaagagcttagataacccagaaaatcactttctaactcttagaagacttgtgtgtattcagaaaattcgaagtgttcaagttttttttcaagccaagccttctttctatttataacaactttttgtaacaacctgtaatcgattacgcgcgccaaataatctattaaaatgacttatgtaatcgattaaattgtcacttaatcaattaaagtgttcaaggctctattatgggtttcacaacaaacaaaataatcgattaacctgagctgaaatcgattaaatcagagaaattttatttcagaaactacttgtgtaatcgattacattttatggtaatcaattaaagtagtgaagcaagctttttcaaatagcttatgtaatcaattacgaataacgataatcgattaacacaacaatgcacaatattcattttacactatgtaatcgattacaagagttgtgtaatcgattaatatgttcatcaaagcttttccagttttaaacacgaaccaaataatcgattaatccgctatgtaatcgattaaaacaatgtattacatttttcgaaaaacattactcaattaaatcatttttcaaactgagtagttttgatattttaatgaaaacatttaagcatgttaatgattatgtgcatgcaatgcaaggatcaaaagattggtctctcatacacttcatttgaattacaatcttcaaggcatgtgaaaagctcaaaacattcttctaagtcacaggcttcattcttcttgttgctccccctatatccaacatacagttcctacaaaacatataaaaacaaaccaatatcaagcataaaaggcacaaactagtacatcctagttaaaccttgttcttttattcaaactttactcaaatggacataaacaaaatcaaaagcacaaagaggtatcaactaattgtccaaaaattacaccaaaacataggaatttatgacaattatcaacacggtttttttatttttggggtgtcatggaggacggggctttctagagtgtctccggtgagattcaagttcttttggttgtagagtagggtgtcacgtggagtgtggcaataaggtggcagcgtagttcagattgcgagatgaccaattgaccattgattttggtttttgtgggatttataaataataataaaaattgtattgagttgttttatgtcatttctaaatcgttgtctattgaattgttgtatgtgatttgtaaatcgttgattgctttccaaatttcttgtgtgattgcatttagatatggtagaagaatttatgatggttgttagctgtcaaaaataatatgccaaaaaatataattaaaaaacatctcatcattatttaatactaacgttgatcgagaaagatcaaaatgattgttagaccattaaaaattaagattgatcaattttttgtttagagactaaaaatgaaaatttgaaaataaaaaatcaggacaaaagtataatttatccatatttttttctttgggtccgtgatcccaaaaatgcagtgtttgctaattttagagttgtagtattgggctattggctattgattaatgattactacaagcagacgaagtcaaataattcactttatcaatgtatttgtatgcaactatgatttgttaattgtatttgtcttcgtttctcaataacaaaacagcgcagttcgcacgcattgacattacgttcttttatattttgcgtgaaatttaattgtctaacaaacgaagttatatgcgtttataatataaatattagtactttgtgatatctgacgtcatcaaatattagatgagaaacagaattggctataccaatgctatggtatgaacgcgattgttaggttgattgaattgattaaattaagtctcagctcacgaggtgtggaaacaaattcatgtgaccaaattgtggataaataagttaatggtcaactcgttaatgatataaataaactattataattttaattcatgtgacccaattgtgaataaataagttactggtcaactcgttaatgatataaatcaattatacttgttctgtatgaaacttagaacacaaatgtacagcacgaaagtgctatatgattgctgtttgatcaccctaactctacaagtccaaggatatcaatggaggatgatatcttggagcagaagatcactgaagcacgcgagattggggtggggtgtgtgctcagtgtaattgaaagagggagagctagagtgggtgtgtacctttcaccaacgagcattatgtatttataggcatagtacctgaccgttggctaactgcatcgtgcgcgagtggtttcctatatttccggcctccacctgcacgttagtgactacctgagtggactgagtctcagtccacattcgttgaatcttaattaacatatcgtaactatttgggccttaacataggcccaattgtgactccagaacagttgccccccagcccggttgccgagtgcacttggtagccggggtgctttctccgacgtcacaattgtcaggttgacagactttccgactacaattgcctgttatacgggatggatacaatttctccgtcctcgtttgtccgggcacacttcatccggacacgttgtggacgaccccggttttatcttttgtttgtccgggtacacttcatccggacactttgtggacgaccccggtcattatccagtgtagtcgacattcgaaattggagtcgtacagccgttcaggagaacattgtcggcttcatctcttcaaaggattgtgcccggatttgtggcacaaagccgactcggtttaaattctacccggatagttgtccccggagagactgcccccagacgtttgtcctttgcatcttgcgaggctcctagacttcctcctatacgtcggttattattctttacctttaaaggtaattaatgcatttaatgcgtccgtcccttcactgacccagtgatgattgcccgtggcgtgtttttaccataatgtccttgtgtcgtttcagtttgacaactgaaccgtttcttttattctggcggttactgaaactgccctcactttttcgaatttttaaattcaaaagtgtcttttcgtgcctattactccatcacttgccatttctgcctgttccctttctctgtcacttcctctctttctctcaaaatcttctcgagtgtttctttgcgttctccgcgaaactcccttcttgttcatcttcaatccttcgttatcaacaggttagtatcttctcctcttccttttttttgcattgtttgttgttttgacattgttgtgtttctgtcgtcgtcatcattccttagggttccttcataatttccttctggcttttctttagttcttgagtttttcttcacaccttctggttttccgactttcgctttttcttttggttgattcctctctgtggtctcccatcctttaaccgctatgaagttcacccctgaagaagaggcggagattcgccggaaatttgggccacgttccgcctggctgttatacggccttctacttccggcgggggaggccccaagtgaccccctgtgccgccatacaggcggttcttcttcttccaaaaggcaaagaaccgccacctctcttggtggttcatcgccttcgcctctccctcttcttccgggtccggtggatcctagccgaaggcctttaggcccaatggagtcaggtccaactccttctaggattttatctcctttgggcccttctcctgttgggcccaatgccggcactggtaggccccaagatctttctttaacagtctctagtcgtaaccccagtattccggctagcccctcttctcattccgaggatgaatcgtcctcggatgaaataatgactgttgagtacgaggcctgcatgaactgtgtgtccgaggccattggttttagccaactgggatccgacgacattgcggattcaatccttagaatgtgtcgtcataaccctattctgcgtcccatttccaaggagttgcatcctgggcggcccggccatgctgtcgtcggcggggttttggcctcaaattcttgtgactttaatgcgttgtctccaggtacgttttactgactcactttcctactttgttttcgtaggtataatgggtgttactcccgacacagtggacaagtctgcttctgtcgagtctcaatctgaggtttccccggcgttagcttctaggttcccctgggtgacccacgaaattctccgaacctcctctacccttggcctccatagcatattgtcgaccccagtggggaggcaggacggattcgtcttgcaggctcccctacccggcgagccactttgtgctcgacgggagggtaatgatcctaacttcttcttcttcttccaagacgtagtaacccaaataggtattaccttccctttttcttcttttgaaattgaagttttgaatcacctccgggtagctccttcccagctccatccgaatagttggggttttcttcgttgtttcgagttattctgctcggatttgaaaatcccgtgcacagtcccccttttcttttattactattctccccatactcctaggacggctagggaaccttctaaccggaaggggtggatctccttccgtagtcagagttcaagaaaactctttgggcccttttcggattcgtttcggggcttcaaagacaaatttttcaaagttgtcgcgtcgccccactgtcagccctttttcttgtccgggcccgagtcttctgatgtggagtgggtctttcctttgtactggtcgcatgatcattacaaacaggataactacaattatcgttttgtcgaggaggatctgtccgactcggacgcctcctccgtcttcgttatttctgaattcgtgggcgctcatggtcggcccaagacttctgactacatcggcagcggacgtcggactggtctgctttggtatttatattttcttgatttgtgtttgtacttgtgctaatcttggtcttttcctgattgtagccggcatgggatctcgcgctcctcctcctcccaaaactaaatccgacgccgcccgcccttctaagccggctgaggccaagggcaagggcaaaagacaagccgacgacaacctcggcggcgcgccaaagcgacggggtggtcccacctatagggcattttttgatgagagcccgcaagtcttggcgttggatgcaccgccgaccgcgcagccggccccagcttcttccccggcattgaatccggtcacggtggtagacaccgtggaccttactgtggccggagaccggacacgatataaccctccttccgactccgaggatctccgggcacgggatcgctcggacaacttgtggaaaaagggggttactgaggcactggtccgtttgaccaagcccccttcctacctggccaacccgggcgccccggtaggtgaggagttggacgagatggtcaaaatcgaggagtacgcgtacagaagtgcttccttggctcgtgtcctcacttcggtccgggagaagtaagtcttcttttaactttgaccttttgatctctatttgttcaatagaaatatttctaagtgttgtcgtcgcagatatggggtggctctggaggagaaggagaaggcactggcggagaaggataaggccttgggggagaaggacaaggcctgttcggcacttgtttcccttgaggctcaactcacttccctccagacgcaatcggcggcggaggccaaactgctgagggaggagcttctcaagtctcaagccgagtcggcctcgttgcgggtaaagctggctcggtcacaaagttcccttgaggccgcggaccaaaaggtggccatgctgacctcaaatctggattctgtcaaggctgataaaggagcctgcgtgcagaattatgagggtcagttggtcgctatgaaggcaagtctccgtgccgccgccgaggagggtttcagcaacgcccttgagcaaataatttttctgaatcctcgagtggccctcactactgccgggatgcatttcttggcttatgtcgaggatggccaatttttccctcctccggcgtctggagctcccgcggcggaagcagtgggagttgagtctcctgttgctgaggccgccgctcctgccgactccgatattattactcctgccgaccttgctgccactgccgtcgaccctgctgccgccaccgaaaccgttcccgccacgtcccaaccgggtgctgattccccagttcgccaggaatgaagggccgggatgccgattttcaattcgtaattattttctctttttgttgggcccggtgcccggaacaattaaatttcctttgttgggtctggtgcccggaacaattattcagtttgtatatacgtttcttaagctcttagcttaatccgcaaaatatcttgtgcgcgcatctttttggttccaacgaccatctattcgaatatattatttgtcgtttcatatgtatccgaccacaaacaactttgctaacgaggcttgatcagagccggttagcatatcatttatagtcgttatcatatttcgaaatcatatataatgactcaaaatgtgtaataattgataatacttgcattgatattcgtcgttacaataataagcatgtccgagtaccgggtaaggtcggatcgacactttagagtcacaacgatacaacttattcaatgctaaacataacgtgcccggaaagctaatgcttccgagtgaatatttcctaacaatgtcttcgtcgtgaaagaggaccgcatggactcggataactccgttccgagtccttaccctcgataacgaggtttcattatcacgctgtcttgtgtactcctgatgaatagggaccatatggactcggattcgacattttcctgatccatacccctaataacaaggaggtcggcgacgttaactgtaatatttcttcagcttgtcagcattccatgttcgtttaactggtttgccttgcaatgtttccaacatgtatgctcctttgtctaactttttaatgacccggtacgggccctcccagttagccgcaaattttccgtcccgggcattcttgtttccgatgtcggcacgtcgtagtaccagatcggtctcttcgaattcccgcggaaccacctttttattgtaggcgcgtgccatctgttgtttcagctttagttccctgttgtgggctgctacccggatctcctcgacgactgtcgactccagggctaagacttcattgtttgtttcctccccggcttgtaatgtttgttttcgtcgccacgattgttgtccgacctcgactgggatcattgcttcgtttccgtatgtcatgcggaatggtgtctccccggttgatgattggaccgaagtccggatcccccataggacatagtataattgttctacccaagtcgatccggcctcatgcattcgttttcgcaaggcctccagaatggttttgtttgcggcctcagcttgtccgttggattgggggtgctctacggatgcgaaccggtgtcggatttggaaattagccatcatctcctggaatctcttgtctatgaattgggttccgttgtcagtaattatttctccgggaattccaaaacgagagattatatttctttcgaaaaatttctgtactcgggccgacgtgattgtggttgagggggctgcttcaatccacttggtatactagtccacagcgactatcagccacctcatctgtccttccgtcggcttgaatggtcccaacagatccatgccccatttgtaaaatggccatggcgccgaaatagattgcaattcttctggtggggacaaaatccttgacgcgtggatctggcaattttcacaggatctcacgtgttttgtggcgtccgtgctcattgtcggccaaaaatagccagcccgtagtacctttcttgtcagtgcccggccccccatatgctgtccgttgattccttcatgaatctcggataggatatagtcgactcggtttggggccacgcataccaacaaagggctatgtaatccccttctgtataattctccgtcgaccatcgtgtacatggccgacgttcgtgtcaggcgtcgggcttctaaatcgtcgtctggcaaggttcccctttccagaaagtttactattgggcgtcgccaatcctggtcggaggtaatcatcattatacacgtcggttgcatcgtttgctgttgaatcactgtccggttgttcccgggttttttggtgctcgccagtttggacaggatatctgcccgggtattctcttctcgaggaatgtgactcactgtaatatcgtcgaactcagacatcaattcttttacccggctcaggtatttggccaacaaaggcccttttacctggtagcgtccttcgatttatgacgcgactaactgggaatccgtgtagacttgtacattgtgggcctcttgttctttggcctgcaccaatccggcgatcaaagcttcgtactcggcctgattgtttgaagtcgggaatcctagctgtagtgatatttctgtagctactccctccgggttctcgattataattccggctccactccctttcttgttggaggacccgtctacgaacagaatccaccggtcgtccactctcggattgtggggggtgagttctcgtacaaagtctgccagcgcttgggatttaatcgcgtgacgagcctcgaattttagatcaaattcggacaactggactgcccaatgggtcagccttcccgccaaatccggtttgtgtaacacctatcggattggctggtctgtccgtacaataatggtatgactctgaaaatatgggcgtagctttttggcggcgacgattaaggtgaaaacaagtttttctaacttctgatacctcaactcggagtcgcgtaatgcccggctcacaaaatatactggcttctgtgtagaatctacttctcttactaaggctgcacttactgcttcttcgcctaccgacaagtacacgaccagcacttctcctgttttcggccttgatagtactggaggcgacgccagtgacttcttcatgtctgtgaaagcggcttcacactccgggctccattctatgacggcctgcttctttaacatcttgaagaatggcaatgccttttccgctgactttggcataaaccgggtgagggcggctattcgacccgtcagttgctgaacctccttcttgttcctcgggaattgcatgtccaacacggcacggcacttgtccgggttggcttctattccccggtgtgttagcatgaaacccaagaattttccggccccaactccaaaagagcattttaaaggattgagccgtatgctgaatcttcgtagccgatcaaaggtttcttcgagatcttcaacgtgtctgttatcatctgtcgacttgacgatcatgtcgtctatgtaaacttcaatatttcgcccgagctgtggctcgaaaactgtgttcatcatcctctggtacgtagcccctgcgttcttgagaccgaatggcatgacgttatagcaataattagccctatcgccgatgaatgccgttttttcttggtcgtccgggtgcataggaatttgattgtatccggaaaacgcgtccatgaatgacaatactttgtacccggatgagttgtcgaccagctggtcgatatttggcatggggtaggcgtccttcgggcacatcttgttcaaatcagtgtagtcggtgcacactctccattttccattcggctttcgcaccattacgacgttcgacaaccaagtggtatactgaacttcgcgtatgaagcctgcctgcagcagttcatcgatgtgggcccgcaacgcctgcgctctctccggccccagtttgcgttttttctgttctaccggcttcgagcccgggtacatggccaatctgtggctacaaaaggcagggtcgacgccgggtatctctgacgccttccacgcgaatatgtcggtgttcttcttcagacaacggaccagagtgtcccgttgctcgggttctaagtcccctccaatgttggtcacctgatcggccgagtctccgattacgacctgctcgaccttttccacgggttctggtctccattcatctggggcttctcgcatatccagctccacgacgttaacaggacgtactcggtttgaaccattgtcgtcggtgtctctctcgctcctacgaaccgtgtcgtagtaacactgtcgcgactctttctgatcaccgcatatagtcaccacttgtttgttgttgcccacgaacttgagtttctggtgcttggtggacattaggatatcccacctatggatagtcggccttcccaatatcatgttgtattgggatgggaaatctgccacgacgaactccacttcttcggacttataagattctctcgttcccagtgttaaacgtaggcggatggatcccataacgtttgtgtttccgccgttaaaaccgatgagcatcgtcttgcaaggcttcaagtctttcacatccaacttcatcttcctgaatgcagtcagcataataatgtcggcggagctcccattgtctacgtacattcgtcttacccggcagtttcccacggttgctgatatgaccaacccgtcttcgtgtccgggtactactccctccatatcctgctcggtaaagtacaaaagtggaggctctggctttccgacctgggctttgaatctaggttgtgcctggaccgacaatacttctttcaagtacttttttctttgagtggaggtgtcgccgccgccacccatacctcccgagattacattgcactcaaattcgggctccgggaactcgtcattatcttcccggggtttctttccttcttcttttcgttgactttcttctcctttgcgtttattttttcttccttgtgttcggatgacgtactgcttcaaccttccttcccggatgaacttctcgatcgcgtcccgtaggtcccagcattggtcagtagtgtgtccgggtccgttatggaactcacagaatcgcgacctatccaatccggccttgttgaaaacggggcgaggacgttccactttcttcatttctgtaaatgcaacttccttccaaatttgtgcccgggacacgttcagtggagtatacttctcgtatttgttttcgtatcttcctggtcgggatttcggttcatgattccgactacgattctctggatatcctctattttttgggggcggactcctcctatcatgccgttcttttcctcgtccagggttgttgacgacctccatttgttctagctccaaatatttcttcgcgcgagcacggaactccatcaacgactttaccgggtctttatatatagacttggcgaatcttgatgaaccgtcgagcccggcggatattaaatatacgtggactctctcctccaacccctcgacttgcagggctgcctctttaaacctatccaaatagctttgcagggtctctccgggtagctgtctgaccttgcccagagtgaactcggactttggctgctttttgctggtcgcaaaatttaacaagaacttctgtccgaagtcttcaaaatttttgatcgacctaggcgggagggtgtgaaaccacgtctgcgccgggcctgtcaaagtggtgacgaagatccgagatatgatgggctcgtcaattccccggacacacatttgcaaatcgaattcatcgatatgcacttgcgggtcctgcgtcccgtcgtatttcgatagaaaagatccatcaaaatcgtccaggtatcgggctttcacaatgtcgtccacaaaagggctgttgttttgatgtccccgactatacttccgacggtatatgggccctgtcttttgacagaaaatctgttcttccttcttgctgtgtccatcctcctgcagaaccttctcactacttatccgttgactaggattgtcgttggggatctgtcctgcatcgatgtcatcacatgtctcgtttcgtgctcggattggactccgatcttgctcgtccgtcctcctttgatcttctgggtcggcgtcgcgtctctgagttatttgagttctcagatctagtggctgctctgtccgcctttgattttccggatttgtattccttcgttggttcaggtgtccttaaatcctgcgtctcgccctcaggatttgacgactgtatgctgtcgatcaggatttgtaattgctgctccaattgtgccgttcgctgcatctcggcacgtctccattcttcattacgttcctcgatttgatgagtgatgtttcggatgtcgtcttgtctttgtaagttctgtcgtctctccatgttctcaattcgagtcaagattgaattgaggacattactgaccagctgtcccccgagctcgctttccggacacaccctccgtgcacccggagtcctctgctgatctgtttgagcgggcgaggaagcctcgtcggaaacggcttcagtcacgtgtacttcttctcttcgtgccacgttctgattctccggtaggaagatttccctgttcggcatctcggagcgtggtacagaatggctgtttctcgtgttaaccattgttgcaaggtgtgggactcgaaatttatcgttccccacagacggcgccaatgttctgtatgaaacttagaacacaaatgtacagcacgaaagtgctatatgattgctgtttgatcaccctaactctgcaagtccaaggatatcaatggaggatgatatcttggagcaaaagatcactgaagcacgcgagattggggtggggtgtgtgctcagtgtaattgaaagagggagagctagagtgggtgtgtccctttcaccaacgagcattatgtatttataggcatagtacctgaccgttggctaactgcatcgtgcgcgagtggtttcctatatttccggcctccacctgcacgttagtgactacctgagtggactgagtctcagtccacattcgttgaatcttaattaacatatcgtaactatttgggccttaacataggcccaattgtgactccagaacaatactatatacaaaaagaaattttatattcaccaaaaatacaaaagaaattgtatagtaatatttttgtcatgtgaattctaatcttttccttcaaattttaattatgtcatttagaaaatgtatcattaatactttgtagctttaaacagcagtatttatcatctttattattactttttttatataaatatttcataactctttcttttcaccaactatccattaaatttattatttccctcttcttttctcctctctcaaaatccgaacatataaaataatatgtcaattttaaaaactatttaggattacatttacaatttaggattgcaggaatagtgtaatattgtacgccgtcatattactatttttaaaaataatcctttgtatcaattgttacgtaattgattgtttttttagagatacataattaataattaatgtagaaagtcatattaagaaaaaaaaatttattgatcatggaaataattaacgtaaaacgtgaatattttctattaattttcatataatttaggtaaaaaataacttttagaattgattttgaaattgatgcagaatattgtatatacttcctctatgtttaatcggttaaaaaatcaaaataatatttttttaataaatatttactaatttgaagttgtttgcaaactatttatcaatatgggattgtcttggcgtgacccattctatctctaattttgttgctaaatctttttgcgacagaatattcagtcgcaaaaaatattagctaccgaattaggcatgttttttgtcactttaatttttcaaattaggcgccccaaattccgtctctaattcagtcactaacattttttacatgaatattctgttgaaaaaaatttaatgacagagttagagacggaatgagtcacgctcaaattagacgtgtttgataaccacatattaataaataatttcaaacaacctcaaattggtaaatatttattaaaaaaatattattttggttttttaaccatatttgatctcgagaacggatttgactcttcccatggcgagtcccagtgattcatggttgcgtttacaaaaagtcaaaatgaaaatttatactgaattcaatgatttgtttccctaacaaagtcgggatacgcacctgctagcaagttcggattttattttcatgcctaaaggaaaatataattttatattagaatccgtttaacttgttttataattaaaataaatggtgtagctcatgaactagttagggttcctaacaccatctttacctagtctccaactctgttatcatctttcgtcttctattgcttagtttattatcaataaaatgccatcagcttgttcccgtaaaaaaaaagtaataatgtataaataattgctttttaatattgataactaaaaaaaatataaatttatgaatatgtagtttaattaaccaaaaaaacttgtaatattcaaatttaaattttttattttaataaaacaatattgtttctgcagtaaaataattcattcttagttaaggatgtactaaataaatgtttataatgctgtcagaaaaataaatgtttataatattataagtacttatatctaattaaattgtttttaacgttaaagagaaaatttggaaaagtaaattgaaaaaaacaataaatattaaattctttcaaattgatataaatatattttttagtactaataaattgttagtttaaataaaattagacttaaattttttttaataagatcttaagatcttaaatttagagtcttgtaaattaaaacaatatggttaaaagatctaaaggtgttttgtcaaattatttaataaaaatttacaaatattttatactattgatatataggcgaatttaatgaaacaaattgtacatcttgaatcaataaaaaaaaaagggttaaaaaatatgctatcactgttttagaaaaacaatattaacttaaatttgaaagttgagaaaaattaaagataaaaataaattttagcaaaaagataaaagatatattttgggcaattttaaaatagttattacatatgtaaaaaaaatcaattgcctgataatttataactagataatagtgtgtttcaataaagttctttgtggctatctatgtataacatcatttaagatggatttatttttatatcataaatttgaaacttcaatttgaaaaaattaatttgctttatatggatagcatatcatcttcttgtactattgtctgcattaatcaattgatataaaattattttaatttaatatgtaatttcaagttttaatgctaggtataatataattatcttaaatacttagattttttttttatcatctataagaattctacctaaactttagtagataaacttatttctcataaaagatatttataattaggcatggcaatgggactcgcacccgtgggtacccgcccgaatccgtctcaattttaatggggcaaaaccgagtttatcgggtctaggttcgggttcgggttttccccgcattataaatttgggggcagttgcgggtttgatattgatgatatctgtcctgccccaccctactaaattataaaaatacccttgtctatatactcattctcgacctcgcaacttctcattcttgacctcacaacttctcgttctcagtttgttcaaattgatttggttggaggcaaaaaacagaatccacaaaactgtgtttcagtttggtatccttgtaagttgtaagcacttagatctaaatcctaatgcaattttgtgattctttgaattatctctctctatgtttctcggatatggggttctaatttcatatggtagagccctgtatcatgtattaagtatttaatttagtacctttgcaagcacttcgcatttccagaaaaaccctgagcttgacgatggcccaagttgctcaaaatcctagtgagttaattttcattaggttccaaaggtttcaatactcgaaacaacttctatttagttcattttggagctatcgatttaattaattgaaggaaaaaaaatctagaaatagtttgttgagtagcaaaaatttgtctaattaatcactatcctgaaatcaatgttggttgagtgctttcaagttgttaataggttctatatatttgggtttgtttgcatgttatcaggaattagaatgtaaatttacttcttaacttagcagtttctagataaggataccatgttatttgaggagtttcactgcttatgttcaaagctttgggttatcttcactctccaaatactatgttctacatatttaacaagaaaacacactttatctaagcaacttagttgtgggttgttggaaacaacaccaacttacatgcttacataattgataggcagctgaactaatgcttcttctcttccttcctagtcctagctatctctatcaattagatagttaccaaatctagcttaaagttaatattttaattccacttttttttgtatgtgtcaaaagcttcctcaattaaagacttgctgaagaatgtctctcaaattttctcacattgtgtaccatataaaacaaatttattttatgtttcatagtcaaaggacttctccctttaattgtattacacagagttcatcttatcgtagaggtctctgccctaggaaataggattccatattccatgatttataatctattttctatgtcaatagaaataacaagcaatgaaagtaaccaaagtggtatttgaaacttatatgttatagcatttgttaattttagatttgttttccagtaattagtttctattttatttcctgtaatcatgttagcaagattctttcttgtaaattagtcatttagtaaatttgtaatcagcctgtattacaaaattatgaaaaatattaatctttttctcatatatcaagtgtatggtatggtatgtgatgcttagaattttaaaaattatttagtatttaatataaagacttacaatgattaatcactgctacataaatcgcattctgcatcggtcatttagccctttctaagacagttgtacaatcgtctttatatcgaacgtcgttgaaaatcatctttttctaagacggttgtacaaccatctttgtatagctcactttctaagacggttcctcagaggaatcatcttagatgatacttttttttttaaaaaaaaaagagtaacatgtatatctaagacgatttttccgaaccgtcttagatgatacttttttttttaaaaaaaaaagagtaacatgtatatctaagacggtttttaggaaagaccgtcttagaatgtggtcattctaagacgattctcctaagaatcgttttacattatcaacattctaagacggtttcatacgaaccgtcttagaattaagtttttttttaaaaaaaataaatttaaactaagacagtttttcctgaataaccgtcttagaatgttcaattttccttaaaaccgtcttagttagaggtgttttttttaaaaaataaataaatttaaattaacactatttttccaaataatcatcagagactgtagtacaacaagcatatgattttaataaggtattaagattcaaccatttatcatccaaagaagtgtgaaatagtaatccaaaagaaaacatatcacccaattacctcaaagctccttcccttcattgtatgtttgatgtaaatgttcctgcataagcaagaacttagttaaaatcagttatttcaagaaaagatgcatagtaagaataagattaataacgaaaccgcattatcatattgttgcatgccaaatcaccatctgacagctataattaacaggccaataaagaatccaaaatgaaagcagcaaatgttacttagtgactaattatatgatcttttttagttaataactaccccatagaaatattcagttagtatttatatctagttagcgtgttagttgagtgacaacgttaactagttatattaataaatatagtaggatgaagatttccaaacaaatcataattaagatgattgatgcagtttttattggttaagatgattcatttgttagaacaaaaacgaaaatcttattgtaaaatggccagtgatatatatcagatattcttatcacttcagttaagtcaattacttactgtgaattttggatgaaattcgaatttaccttaaaaaaattgagtgacattgtttagtaatatatctttctcatctttactcattatttttaaattaaaatttaatatttattttaaaaagttgtcattgtttcaaaaaataatttcgtatcatgatacaaattgtttaccattaataaaatataagttctacgctaaaaatattataaattattttactttctttttctttttctgtaaatgattatctcctaaaaaaataacaattattattaacccaaagttatcaccttcatatatattttacctacataaaaggatgaactaacagaaagaagcagttttgtagctcaatgtcattcatcatttatacttataagatcaatcaacaatgacactcccatagaatttattttttctagcatggatagagatttaagtatgatttacctcatggccacagtatactcgagttgactttggtaatgaagctagtgttacattaagtgactgatacatctgttttgtatttccttcaattacaaatttcccacaactagcaataaactatagagcaagaataacacaataaatctagagattagtgtctaaccaatgtgctgaagattaatgacatgtttgatttttattttaaaacaattgttttggaagcaaatttcaaaatttaatagatttttcatgagaaattgattgttgaatagtgtgaaaaatgttctagaaaacagtatttaaaacttgaaagtgacaagagatgaagaattaaaagcaatgaagtttgattgcttcccctgattgtaagcaagtgcgatagagacaactccatgcatgagaccagcccaccaaattgttacctgtgaaacaagatcatcgcaggaatgtaatgcctcaattatcaagagctcaagaccctgacaaggaaatgggattaaaagcacatacttgttttgtaacaccccgtaggcctccgacgtattatcattaataatatcagtttagcgcttaaaacatagtttataaaactcagcggaagcacagaatcgcttttcttgatacattatgtatgaaataacataaatcataaaaagtcacacaccaagcacataaggcacacccctgctgatccagtttctcataacataaaccataaagacagatcactaataaacttaggcagatttatcaaataaacaataactatcctcgggagaataggtctcatatacatatcataaatagttatgtacaactatacatcaagtctcacacctcatcgtgtgatacaaaagaataacagccctcacagagggtatacagaactatacaatcctcatctggtgtgcatacacaccatccctactctagggtacaaaatataagccaaacaatccaaaagtgagcctacaagctccatctgctgctatcagtcaagcagaaacgtctctacttgggcctcctgccctgagactgctctcttcgtccggaaaagtcacctgaaaagcataattccccacacggggtgagataacaaatcttagtaagctcagggtccatggaggcttctccttcaccctggcccacatccataacacatacatcaggcaatcacaattaatggcccactggcctggccctctggccctcataacaacataagcatagcatacaaacatggcggagttgcctcaacgcctggcggagctacctcaacgcctatatcagtgggagtccggaactcgcacctgtgtcatcccattgggtgctaaccctttgcatggatgcacaacatatggtacctccgagaatagaaggagctacctcaacttctagtcccctggcctgtgggaaccaatcccctgggagctacctcaaccaagagccagccatgctaggaggaaaccaccatctcctagggaggtccatatctatctattggccaacagatctatcacagtcatatcatatcacaaagcaagcacagatgcatacatatatcattatgagaatgcaactaccaatgcatgcatcatgaaatgaccaccactcccccggagtgtggtgtggcacacaagatgggaaatcattccccagggacactaaacttacctggtaaggtctcagtctgcacttccttcccaggtctgtggctcctgccaccaaaagtctcaaaatcaatgcctaatcaaagcataagcaatttcatatcaaaaccagaccacagacatgcaagtcacaatatatatcataacagaattcccctatcctagggttcaatcagaacaagcctgcattaggctcctcacagaccatacaaggtccaccatggctgcacacaaagcatttgagtcatcacaaactcaatgcagctcacctaacagagcataaactaaccacagcctcacaattcaattgtaatcagaatgggctgaggtccactcaaagccttgctccattagcctctcagctcagaacatcacaatcaaggctctagcttatcataaaaccatcaacaagtgactctacatcagtcacacagacatatacagagccaagattcaaaataatcagaatcaaaaactgaaagctaatccttcatctattctaagccctgaacaactttctcaactggaccctgagctaattctagccccagctcatatgggtcactattcacagggacccccagaatcaaaattaaacggtgaaacttgtgtttcttacctcaatggcgactccaacagcctcagaacagcttcctctagcttctatgtcctaattacgctgtggttctgcgccaagctcaagttctctaagcttttcctctgaggttcctcttctcacttaaaaaatgggtttttcaaggaaaatgatgaaggattaaagctttcaaagggtttctaaaagatcaagggtcatcaaaaggtgtttaggctagtatataatgtccctaaaagcttggaagggtcttcaatggaggttggaggctgagagaagaagaagaagctgatttcctctcaattttcgcatttttgcctttaaatacccgacctgcccgacctctggcgccagctccagcgccatccgcgccaataggtcggttagtctggcgctcttagcgccactcccacgctcttagcgctgatttccagaacctgtggcgccctcagcgccactcccgcgccagcttccagagactctagcgcccacagcgccacatctggcgccaccagcgccggctgggaaatctggcgctcctggcgccaactctagcgcccttggcatggacctccagagatcctggcactttcagcaccaccctggcgcccttggcgccacattccagaacgcatggcgcccttagcgtggatctggcgctcttggcgccactttccagtgggtctggcgccatcagcgccagccctggcgccatcagcgccgcacccttaacagggttttctgatccgaatccccgtgctatcgcgcggggttaggcgccaagaatgagagtccttacatgttttaactcaattttctcagattgagacttcttaagtaagttggataagaaggacaaagggaaaacaaatgcagttcttcccactaagataagtgccaacagcaacaaactgaccccaattgattttcttgggctaataaagacatcaaatcgtcaacatgttaatttcacatacacatgaaagtagtttccatgcggtttaatttccatcttaaaatcttttacctttgacttacaattcgccacttttctatatctaatgcatccatccccacatagaggaagataaagattcagcaatgatgacaaagtggcaaaaacatgtagtgagacataactatatgattgaagataaagattcgccacttttctatatctattatgattgaagaatttcatgtacttggttgttactcttgaactctctgtcacattatgccacatgtagtgagacataacaatgccacaaaaggaaacagtcagaatggcacttaaagaaaataactgccaaagaaataaattggttagcattggaattttttacactacaaaggtggtcacatttcagacaattttcttacttcagatagcatatatggaaggtatggcatgagtaccatgagagcaacctcacgctctgtagaatgcctgggatttgtcagtaaatgaattagggaataatggctaacagtgtactgagatatttcattgttgtggttaagcatattcaaaagtaatggcatttagaattaaccttatcaacttgccaaaatagaacttcttaataatgaatgcactgagcaatccagcctgaaaaacataattataccaatatatatgtatatatcacaagcaaattgcaagaacatcagaaaagaaaagggggcagaattaaaaagtggcaagaaaacttacaaagattcccaacatagtgcttgcaatgaataaatacaaaaaaatccctaataattgtaaggttgtggttaagtcaatgtgagagagtcaaaattctgaattggtttgaagagaactatggaggtagcatcatttactgatatttgaggacagaaaaaaaacttgttggttatagtagtgtagaagcatttcaaaatgtctacaaagatctgtgaaaagggaagcgaaatgacacttgaaccatagaatctatcaaacattcactttcacagagaaggaatgaaaagaagaaacgctcatcagtagaaatgtaaaagagccgaactttatgcaatggcagagttaaggggcaaagcaattggaagaagaaagagatgattttatttacccattagggagattatcgatgaatgtgagaagcattttgagcttggagccaccttcagaagccaaaccagcatgcatctcgacggccatggcatccaccacttgcctcaacctcccaaccctagtgtcgcacccttcctccagttccctcaccacattcaacacagcaaaagaggtagcccatgagaatgggtttggagtgagagacacgagtggcggtataaaagggaacacagaagaataaagaagcacagtttcattttcgttttttattttaaattttaaattcaaatttcaaaattttaacagggggagggtgagggaggggagggtacaaaaagtaaaagacactcaattttaagacagttttcataaaaccgtctttgaacacttgttttcaaagaaggttttatgaaaaccatcttaaaaaagttgaacttaatttcgaaaatgccaccgtgtatataataacctatgtttccaaaaaaaaaaatcccatgctaacagcgtgggagtggcgccgttagcgtgggagcggcgccagtagcatgggaagtggcgccgttagcgtgagattgcaccagaaggcttttctttcgaacatttagcgcgattagtgccaggagcggcgtcgttagcaccaggactcgactatgtggcgcgattagcgccagttatggcgcggttagtggcgcgattagcgtggggtgtggcactattagcgtgggaaagcggactggggcctataaaaagctattttcgcgctttgggagaggaaaaacgttcctcttcttcttcctttgcttttctgccattgatgacttagaaaagcttcatatcttctccatacttcatctaaacactttccacccaactagaaagttgattagaacccctctatgagctagattccagcttcaattcttcgaaagaaccatcaatcggagagatcccattctctaggggactttgcaaaactgagttttggaagggaaagaaggcgagtcaaggatgccaaagcttggagaagtgactttccagccttcctcgacagtttagaggtaagaaactcaagttttatcgattgatttgtgaaatggtcttggggtgaatagtaacccaattgtgttagggctggaattaggcttggattctttagaaaagtctgttcagggggttgttctaatgaatactaagctttgaatcatgactattgatgaagtttggttttgactctgagatatgtatgagtaggaagaatgttgatgaaatggaaggtattatgataggtatgagcttagatgctgttataaaagttgttcaggaggctatataaacggtgaaaacatgttggattgatagttttgaacaacttggttatccttgaaatatagaatggttaagcaacaaaatgctttgaattgagcttatgcagagtctagggagactctaagatcttggttggaccaagatagatcttgctgagggtctgtgaatcacttataaggtggttagctctaataacactaagatagagaacagagaagttttaatggaaaggaatagtgtttcctttcattctaacggttgaggaccgttattgattgattgtttgtatgacttgtgtagggcgtgatagtgatattgctggtggttgtgaccacgaagccgggagagttagtgtagcgctgagagtaggtaagctctttgttcttgggagtgtttcccactgtttgtgttccaccatactccgagggagttatggttattgtatatcatgatgcgtgtatattgaaattgtgtgttactgttatatggaaacacgtatataatgagctgaacactgtgatagtgttgtacatgtgattgatgagttatacattgtgataaatgttaagtgattgatgaaattatgtggccagtagaattaaacttaatagtctatataggtaagtcctgatgtgatatgtgcccacatagctggatgaagcctcctcaggcaaagaaagaaagtcctgatgtgagatgtgcccatataaatggatgaagcctcctcaggcatgattagtgagtcctgatgtgagatgtgcccatataaatggatgaagcctcctcaggcatttatatatgtattaggctatgtacatgtggtattatggtttgataactgtgatggctaatttgtaatgccaattttgatattatgtgcatgaaagtgaaccagggcgaggaaagacctccaggtaccctgagtttactgagattgttatctcacccctgttggggattatgttttgcaggtgatgctcagggagtggctgatagatcccagggcaagaggcccgagtatagggatatggttctgagggaaccctaggcatagagtgaagagcatgttggctctatttttgtttatgcctatgttttgtacctaagagaaacacgtacagttttgataaacatactttatatattatgagattcaccatatatgatgtactttgggtattgttaatgacgtttgatgacgtcattttgtttactacttccattttaattatctgtgataattgctgcgcttaatgaccgtaaatcaatgttaatgaaccggatgcatacgggtcgttacagtgtacccttctaagacggttatcccacaaccgtcttaaaacccgcgtcttaaaagactctttttgtagtagtgaatctaaattgcatgttgaggattcaatcaatttcaaagaaattgacttacaattgatgaattatttttttcaactcagcatcagaaagtcataataactaacaagtatgtcaacaaactagcaagcacaaatagaagcttgtccagtttccatgtttgtgacaagttaaaaaaaaactgttttttttttatgagagaggatataaggagccttggaaacgtaattgttatgctgtttttttgcattaaaactatataataaaacaaacacaataaaagtaaaatgacataaactaagataaggaattcttggttttgcctgtgtttgaaatggacgctttcttttgcaaaagattttaactttaatgtctgtgcactttgtgccaaatggagcgtgcagtggtgccacattgtgtatcacacactttgttttgtaaagttctttttctaaatattttgataactcaggagaccattttattatttgttgttgtttagttctgcatgttttgttgtcattttgatgcatctaacactagcttttgtgttattcatacgaattggatgtggaaatgggataatacgagctgatccagacacacacaaaacatatacctctaatttcactaattttttatgccaaacatgcaatgaaaaataagtgattatttcactaatttttttatgccaaacatgcaatgaaaaacattgatatatcttaagcaatctgttgccctttatatatattgcctctagttttttgttataggaaaatttgggcagtttgtgttggttcttttttataagaccccctctaaattgtctattgcattattgctttatttatttatttttatgaaaatacccttaaatagagatgcagtaattaggttgaaagagattaagagaatggaattccagtagttttaaaggttttttgtggaaaactcatacaaattgttgacaagtttagtaccactaactaaattccttaattctacgattttgtcacatatcccattgtaagcatatatatgcatatctgatatgtaagatgttttatccattttagaatgttttgttgttttaacttttatttgttccttcccttttaataacttcctaaatgattggcttttcagtagtactgaacaaaggtaaataaataaataagtaaataaaaagctgattgctttttttctccaatttatactaattatagtttgtttttttttcttttcaagaaagtaatggaagatattagtgtttcaccagaaagaatttctcctattccttcatcaaatcattcaaatgatcagactccttcagcttcaacaaataatcagactctttcacaaatcgatcagactccattaccaattgaagctgatcctactcctacatctcatgaagatgaagttaataatgtggagacacaaggagtatccactaggctgaaaagtaagatttggcaacattttcaaaaaaaattaaagtcaatggtgtggacaaggctaaatgcaagtattgtaagaaacttcttagtggaaaatcaaaaaatggaaccaagcatttgtggcaacataatgagatttgtgttcagtacaagatttttatgagagggatgaagggccaaacatttcttacgcctaaggttgtgcaaggaaaaacaatagttgggtgcgggaatttatgatgcagaatgtgcaaggggagagctagtaaaagcaattattatgcatgagtatccactatcattgtggatcatattggctttaggagatactctactgccatccaacctatgtttcaggttcctactagaaacacaattaagaaggagataatgaaaatctatgagaatgaacgagcaacatcattgaagttgttggatagtcttgatggaagagtggctatcacatcagacatgtggacttcaaccaattagaagagtgggtgtatggctattacaactcattacattgatgggtgttggaacttacaaagttagattttgaggtaatgaaatgatttgaactttttatattgttaggtctttttattttataaaatgattgaatatgattatattatctatttttttgctattttttatattatctctctctatttatgttagattcatttatgttcttgcttctcatacaagtgatagactttgcaatgtattgactgactgtttgatggattggaatactgacacaaagttgtccactatcactctagataattgtaccacaaatgatgctatgattgataaagttaaggataaattgcacttaggtagtttgcttacggatgggtctttacttcacatgcgttgttgtgcacacatcctgtaacaccccgtgtgcacccggtgtattatcattaataatatcagaatcacgcataaaaccacagtttaaaacaaggcggaagcaataggatcgattttcttgattaattatgtatgggttatatgtatacaataaaattcacattcaatttcaatatcatagcaaaagcataacaaatgcaacatttcactatagaacatgcccctgctgatccagttccataaactcatctcatatcatataggcaggtaactataaacacaacatattcaggaggagaagtatttctataatatatacaagttatatacatccacaaagtccgaaccaatcattggttctacaaaataacttccctcatgctcgagggtacatcaaaatataccaaaaaatgaaatggcctgtagaccatataaccctctacaaggtaaccgatatcaactaggcaaaatgagctgttaagctctcttcatgctagctctctctccagacactccggtcttctctgggtcatcagccctataactgttctcttctcttagaagagccacctgaaaaacatgaatccccatcggggtgagatacatatatctcagtaagctcagggttcttggaggaatttctcccaccctggctcacttccataacacatacattaggcatacacacaaatggcccaccggcctagcatatcaggtcctcataacaaactatcaagcatccaaacaagtcaagcaatggcgtatcatcatcaacgccaggatgcatcatcatcagcatccatcctcagtgtgaggccggaaactcacacccgtgtcatcccattgggtgctaccctttgcatggatgcacgtatatggtacctccaagaatagcaagaatcgacatctactattcccttggtctaggggatcatcatcaccccgggatcatcatcacccatgagcccaccatactaggaggaaaccatctcctagggaggtccatatctatctgttggccaacagatctaatcacagtcatagcacagattctcaagcagatgcacaatcatatcatcatgaggatgcaaactaccaatgcatgcagtatggaataaccaccactcccccggagtgtggtatgaaaaccagatgggaaataatccctagggacactgaacttacctggtaaggtctcagtctgcagtttcttcccaggtctgtggctcccgccacccacagtctcagaaacaaagcctaatcaatgcacatgcacatctcatatcaaaataagccctcattatacaattcatagagcatattttatcagaattcccctatcttagggttcagtcaaactcagcctacactaggctactctcagaccattcatggtccctaaagactgaatacaagccatctgagtcatcccagactcaatacaaacacaaggcatgtcatcatccctcatcagcctcatgatacaaaatatcactgaatggttcaagcctcgctcaaagcaccattcccttagcctcatagactcataacaagtataactaaggctctgaaatggcctcaatcccacaaaggaatcatcacaaaggcctcacatacaggtcacagagccaaattccaaagttcatctaaatcaaaaattgaaagctaatccttcatctattccttgccctgaacaagtttctctacaagaccctgggctaattctagccccagctcaagtgggtcattattcacaggaacccccaattcaaaaatcaaacagagaaacatgagtttcttacctcagtggcgaccagaaaaacctcaggacagcttcccctagctttcttgtccttgatccgctatggttcctcgccgaaactcaagttctctgaggatttcctctgagaaatcactcctcactcaaatggggttttatgagggctaaaaccgaaggattcaagcttttatacgttcctatcacactcaaaggttagggaaaggtgtttaagctctcaaaaagggtcagaaaaagcttgaacaagcttccatggaggtctaggtgaaggaggaagaagaagggaggaaatttccagatttttcgagggtttgggccttttataggcccctgacgcgactcccacgcccccagcgtgagatcccacacccccagcgtgggttaacagacaaaatttcatttctgggccacttgccacgcccctggcgtggactccacgctcctagcgtggacttcccacgcccccagcgtgggttcccacgccccaagcgtggcttgccagagaaaattgcacttctgggctgcttcccacgccccaggcgtggacctcccacgccccaagcgtgggactccagaagaaattggttttctgaactgtttcccacgcccctggcgtggatccccacgccccaagcgtggaacctcagaaaaaccaaaaataaagctttaaacgcatggttataacacatccttaatttgatagtaaaagatgggttggaagtggtgaaagaagatgtagaaaagattcgagatagtgtcgcatattggataacaacacctaagaggaatgaaaaatttgaggaaacagctaaacaattgagaatcccttacactaataattttgccttagattgtccaattaggtagaactcaacttacaaaatgcttgaaattgtcgtaagatatgaggatgtattttgtcgattaaagcaacgagagtgttaatatacttgtttgacaagtactttataatgacagtttgcaaaggatatgtgtgggagattgaagttgttcaatactatcactgaactattttcttctactaaacatccaactgctaatttgtattttccaaatatatgtgagattaagttgagcaatcaagcaatggattacttctcctaacctaatgattcaacaaatggcacaaaatatgattataaaatttgataaatattagggtgtgattcataatgtgatgggatttgccactattttagatcctagatacaagatggagttgcttgagtataattatgaaaaattgtatgaacatgatgttagacgcagggggagcatgaagaaggatcaagatgtatgttgaagcttagatgagttttagctttgtacatgccattcaattgaagacatttgtaatatttagatgtacgagagttacaacttatggtccatagcattgcataaacatcattcattggcttgcattcatgatttaacaaaacaacatggtttgtgaaaaagctttaagatttcatgattgcaaaaaagtcaagtgctcatggtttcaagttctggaaaaactatttttcactgtgttttttgattaccagcattaactaatcaattactcaatataaacacagaacatgacttgattgtgttaattgattaccatttatcagtaatcgattacttaattcatttgtggaacaatgaatccctgtagtaatcgattacaactcgaaataattgattactttgttcatataacctttccagaaaactgaagaacattttaatcgattaaatttgttttcaatacaaatgaagttttaatcgattacttaggcaatttgatcgattacattcagttatagcattttgttataaatagctgttgggtcttttgaaaaacacaactcactacattacgaattttcatagttttcaaaagccttctaaagtaagaagagattctttgagtaacaaagctcttgtccacatattcaaatcttcatggtgtattgaaagatttcttggacaagatttcaaagaatctttggagagtttggtcaaaaacttgtttgctttcaacctttatcaagattggtaatcatatgcattcatatactatggatcatcgggttgtttttctccattagtttctgtgtgtaatttatttttacatttcagtttgtaagttgctattacaaagaggttctttaaagattttctagagtagggttctgtagagggaagagtagagtagggttccctatgtcttgatcattacaagtctaaaagggttttaggttttagttcgttatctagggttgataaagggtgatcttttataagcttgtaaagaacagattttgttaataatggaactctaaccaaggtttggttggaagaaactggatgtagcttctcatgttgagaggtgaaccagtatagctctttgtgttgattaccttctttaatcttttcttatcatcttaatctgtgattcttttggtgaaaactttattactcaacaagtgaagcttttagcaattgtactcttgaactgagtggtttgattgattgaaacattcttggtttaattgtgataaaaatcctaaatttgctgcttgttttaaagaaattttaaagattctattttaaccaattcacctccctcttggttattgtgggtgttcatattattttcacatgactcttttaatcaagtgagctgcattcaacaattatgttatgacttagtgtctgattaccaaatgaaaatgaacaaagactcttttggtagtaatgttagagatgctactagtagtgaagttgttggtgctgcattatttgagtatgatatatttattataaggaaaaaagggctagaagttcttatgttaaatcatagttggaccactatttagaagatgttttaccaagaactgttgactttgatgttttgatgtggtggaaaaataatggtgtcaagtatccaacacttcaagcaattgctaaggatatattagctatttcggtatctaccgtagcttcagaatctgcatttagcaccaatggtcaaatattaagtccacattgtagtcgacttcaacgaactactttagaggctttaatgtgtgctagaagttgtttgtagagtgctgaaaatactggtaaaattttattcatataagttgttaaattgatatttgtgtttattcaacaaactaatacctgtaacctatttttataggttctacaagctataaagttgttactgattgtgctactttaatgaatgaaatagtttcaaatgatgaagataaacaatattttgaatgtcaattttcaatattatataatataaccttttgttctaattgttcttcttcttttatgaaggtaaaatggtgggtgcttttttcactaatttggaggaatgatcaacttatttgctgaaaatttaagttgtttctttttttattatgtaattttaaggatgtgctacttaatcatatgatgttatacttaattttgggacaatatatatttaatgatattgtattttgggagaaattaaatatgcatattcttgttttatgcaatacctagattttatgattttaatcgaattgattgatttggttttataatttttaaattatgattccatgttttgaatgtgagtttgttattgtttttttgtctgttacgtaactaacattttcatcccattttttcaataacaaaaattatattatttttctatttttttctaattttgatcaattagcatgggcggaatgggacgggaaaacccgaccccaacaagaagagggatgaatatgtatttttaacccagatggaattggaggcagggtcggaaattagttataaagttggggacaaaaatagaaaatgcaatactcaccccgttccactccattacaccgtgttaccatacctattttatagccctgttataaaaaaagtctcatcttataatattatgttttgcattcataataagtttcttgttgagtttttaaatactaaatagtttttttttctatgaatatctaagagttttaaatttttaattatatacttataataaataattaaatttattcagttaacattaaatttaatgagataattttaaaattaaagtaatattccattactaatctgatagttttcattttttttattttttaaattcttacaattttatagtttatgttacattcttatcattaataaaataacatttctttaaatatttttaaacttttccccatattttacgtatatttacaatgttgaaaagtatcttaattttacaagaacttattggttgtgaagatacaccgtcaagttgacgttaatgaaacggtacgcacgcaccaaccctaaaattaaggttttaatcttagccattaatcaatgggtatgcatgaacacaagtgtcatttttaatacataacatttttttcttaacttatttaaatagttatttttaataaatcacttaaaaaattcatctaaaaagttaagattcattacttaaataattgatttaaaagttaatttttaagatcaattaatgaccaatttaaaaagtttaactttttatatcaccttcatatccattgattgtataattgatatagaaaaccttttatataatagtgttctcctctggataaacttgatttattaaaaattgaaatttaatttcaatcattataatttaattataatgtaatttaattataatggttaaatcaattttttcaattctcttttgaatttattctcatttggtacattctttatcctaagagcactcactcttattctttctttctaagattctttctatgattagttgaaatttattaaaaattattaaaaattattatttttgataaatttttgttgattatttttcttaatttatattaaataagaaataaaatctattacaatttacaattttcaataaattctaaacaattatagaaaaaatcttttccggaaagtataaaaaaaatatcactaacatttaaaaagagagatagagagatagaaatatatagataaataaagagttgtttaaatataagtagaaagtaataaatataataaatcataataatgtttcaaaatatatagataaataaattgaaatataaacaaataataaagagttgtttaagaattcacttgtaacaatgggagtcgtgactatgcctttaaaaaattgccgtacgtaatgtgatgacgtcttggttgtgacataagatgatggcacgagtttgcccgagttcaattttaatttttattcttaacaatgataaattaggcataaaaacataagacgtgattgtcttgtacgttttttttatatttttttatatattttaatattacctttattccattcttcattatttttcttttttgagaggaacattaccctacaaatacgaggacatatgatttttctagagaccattattctccaatagaaactgaacatctgaatatccaaattattatatatctaaaatttaaacttaaaatcattattaaattaaccatgtttgtggcaatattaatccatgtatagtagaagttaagattattatcattattataatctttgtttaacaaaaatccaaccaatgatatatcaagatattttaattcagctaattgaataaattatcataaaatattgtaattccctcagtatatgttttcgattattataaatgaaaagaggaaaaaaatcatcaatatacatatattgcaaattttcactaaatatgataaaatatataatatttatgatatattaattttttaccaacaattttttttgtcattatttgaatacatacatacttggtgagagacgaaaacaagagaaaaaaaaaatcatctgattacgtaatccaaatgcgagaaattttattatttcatattttacttttcgtttaataaaataacgagtattgcaacgtaaagtgatggtgaaaggttttgcaactaggaaatgtattcctaaataaaggaaaatgtaatcctaaataataatttgctggtatagtatatataggggagaatctttacatgaaccaggtcaaattgctatagccattacattctatttgaatataaccataaaattctatttgaatatttaatgtaattatatatttaaatattgaaagaggaaaaaaaataagagaatcataactataatggataattagtaaaaataaagaaataaattttatgaaatattttaacaagtaataaatatgataaatactgatcttgagaatttattaagtattaatatttgaatacatatatacttggtgagagatgaaaacaagagaaaaaaaatcatctgattacgtaatccaaatgcgagaaattttattatttcatattttacttttcgtttaataaaataacgagtattgcaacgtaaagtgatggtgaaaggttttgcaactaggaaatgtattcctaaataaaggaaaatgtaatcctaaataataatttgctggtatagtatatataggggataatctttacatgaaccaggtcaaattgctatagccattacattctatttgaatataaccataaaattctatttgaatatttaatgtaattatatatttaaatataatggataattagtaaaaataaagaaataaatttatgaaatattttaacaagtaataaatatgataaataccgatcttgagaatttattaagtattattgtattaatgatacaattagtacattagataattaaactttgaggtaaaacataggaatcacacaacaaaatattgtatgatttatcttgtatataattaatttaatgagtacagaaataacgagttgactattaacttgttttatccgcaatttgatcacataaatttgttttcacactacgtgagttaggactctaattatcaattcaattagcaatcgcgttcgtagtatgcatttgtctctaagtcaattctgttatctagtctttgatgatatcggatataacaaagtaccaatatggttatgctagttagtttttaattttttagtagctaaatattacgttcatatcatgacattgttatctaatgtttcttttttaataatttttagcaaaataatatctttaaatgttattttctatcatttaattttttatattttatttattttttatccttaaaatatttattaaattttttattacctattttaaatacatcaatattttatatttttttacacattcctcctacaccttttttatattacattattattttaaccattgtaatatataatatttaatttattattttaacattatatttcatgaaattgacaatgataaatgttagatttattttattttttattatctttagaaatttatacaaaattggtgtttatataaaatattatactaatatgtccacttatttatttttttaactatttcagcatataattttattgaacacttataatttaataaattaacttaaaagttttcaggtactgatttcaactattagatagttttctaattttatgctaacttttcaagtaattttatccaataaacagacatcagtacataggttttgttgctaatcaaaataattttatccaataaatatcttaaataaataagagtattttcattatctatttttcaatgagagtatttttttaaaaagaatttatttaacaataaaattttataattgtttttaaaatcaattcatgatcttaaatgttatagctcatttcatagcacatgctgacttttttaaaaacgatataaatccgatcatcacataatacattttttttttaaaaaaagacaagctttaattgtaattaaaattaaaatttaaaattaacttcatagctgtaccaatgcgttaagaaatatcagaaaatcaaatcccctaattactatgcgtgtaaattgtgttgttctaagtcaaactttgatacctaaaggagatttacaacagttagatccttcggtgtcaattgcaatccttatttattgttgagatagggataggaagacaaattattttaaaagtcgtaacagaaaagaaaaaaaaacaaaaaaaaaaaaaacaatggcgtacaggttataacaaatcatagatgcataaaattacatcgatcaagtgaaattgtcagcaccttcgcatgtgcatgtgattctatattgacgggagacttctagagttgacttgttctcttgacagttactcaatagtgatcgatacttcatttctttaattttctactagaattattggtattactgtgttagacatttcaattattgaatcgatcgaagtaaaaaaatatcactagactccaaaaaaaaaatatatatatatatatatatatattatccaagtaagaataattttagtcaacttcaaatcttgataattgtgatgatatacaaaattatattaactgcaccctaatcaatatttttaaaatacagtacttcaccgtttctttatttctttagtctctctattcctcgtccttgtaagtctttagcttcagcgtgaacaaaacaaaagatatattaataattaattgaaatcaattttatattattctctattatatgcatatgcattataagcataagcgtagatgatataataagagacttacaacttaggatttaaaaaacttatcgtgattgcgtctgattaggtttaaggtcaatgcataccgcattattatcagaggtgaaactagggggagggagtcagggtgagtcattgccccctaaaaaaattattaaaatttaaaaatgaaagagaaaaaaaaaagagaaaagaaaaatattaaaaaaagataaaaggggaaagaaaatgtaataaaaaaaagaaaagaaaaaatattaaaacaataaaaaagaaaaaaaacataaaagaggaaaaaatatatatataaaaaagaaaaaatgtaataaaaataaaatggaaaagagagataatatagaaagaaaaaaggaaaggatataaaacggaaaagaataataataaaaaggaaaagaataaagaggaagaagagaaagaacactataaaagggataggtatgaacataaaggtgaaaaagaaaatacaaattccaagagaatacgagtcaaaaaagttgtttcatttggtaaacaataattccatgtatctcatcattcttttctttttccctcttttttctctttcttcttctggttgttatccttataaaataaaataaactgctattggcgttccttgtttttagacatgcaccccctaccatgttgggctgaacccgtttttgttaaatctgaaatgaaataaaaaaaacataaactactgtttcgattgttaatgttgtgcaatgtgttttgtgcatctcattcaaaatgtaacagtgatttactttacgcgattgtcattgatacttgatattgtttgtgattgacgcgcagaaaaattatggggaagggtgttattaccattgatgcttattttaagagaaagaatagtgagtttttgccattatctactcctaatgttgaattgttgaataccgagattctttcttcaaagtctcatagaattgaaaataaagaggtagttaaagaagttgatcatgctttattggaaagagatcatgcactacaccctccaatatggaaatatcctataaatcaacaagatggaatttgtcgtgcttatacttaaatttggtctatttcagtgcaagcttcaaaattatcctttttttaggttagagaagaatcgttgtcatttttgctcttcttggtttgatttatttccatcttggttagagtattttccaagcaaagatgctacattttgtttggcttgttatttatttagtaaaccatgtggcaatggtcgttttagacttaatacattcgttgttaagggatttagaaattgaaaaaaagttaattgagttttaacacagattcaattatagatgatttttaacaatacaaaaacacgtagagtaagagtcaagtgaagtgattttaatttctgtgaagtgattttaatttctgtgaagtgattttaatttctgaatatttttttaatattaagtttgtattgtattcggaatacttttatttatgatatagtttttttatgttcgcctctctcaataaaattcttgcatccactatgattattattaagccaaaatgacacgtgaaaattagcttaaatcaagtttttgatataccaaagttcaaaaatacacaagtagaatatttatccataagggacattaggtcttcgactacatattccccaacctaagttttacaaccactactacacaggggacttttaacgacagttgttttacccctaggacgacggttgttgaaccgtcattgttgcgggtgtcgttaaaaaggggaaactttcgacgacggttcgacaaaccgtaatcgtttctaattttttatttatttatttttttaaaataaatgaaaatgacaacggttattaaggaaaaccgtcatcgtaggtcagcatacgatgatagttttctcttaataatcgtcttcgtttctatttaatttcaattttattttttaaaaaaattaaaaatctacaaagacggttattatgaattaaccgtcatcgtaggttgacctacgatgacggttttcgtaataaccgtctttgtaggttttaaattttaaaaaaattaaaattgaaattaaaaacctacgaagacggttatttagaaaaaccgtcatcgtaggtggacatatgatgatgatttcccaaataaccgtcttcgtatgttttcaatttaaaaaaaaaaattaaaattgaaattaaaagcctatgaaaacggttatttatggaaaccgtcatcgtatgtccacctacaatgacagtttttctaaataaccgtcttcgtaggtttttaatttttttaaaaaaaataaaattgaaattaaaagtctatgaagacggttatttacggaaaccgtcatcgtatgttcacctacaatgacggttttcctaaataaccgtcattgtttgtttttatttcaatttgttaattcctttttttttttgtaaacgcatctcctaacttttttttttgaaattggtttctgtacttccaaatgaatttaaaaaatacaccacattgaagggattttattctataaaataaataaaaaaactaaattgttaatgcactaaaatttaaaattcagcttaacgctgtaaatttaatttaacacaaaattaaataaaataccatgcaacaatatgacatactaaagggtcaatatttaatatgcctacttcagaatcaactggaataatctcacaacaccacaaaattctaccactacatttttgtgtacctagcgcggaaagcaactccaagcatccagtcattccttgaataagcattgacaaatcttccttctaccagctacaaaataccaggatctcatagtagttaataaaactatatttccatcatacaagtgagaccagaagatattattcatgagaaaaattaaagcttctttcacctttctagttgcttcccaattcttgtccttgattataatgggtgataagcttgcttttacactttctgaatgtaatgctaaagatgagcatatcaagaaacaaacgaaaattgtacaagaagcagtggcaggtattattcaattattcatgcattgttgtgtgtgtttgtttctcatttcccttcagttcttgaatttggacaataataatcatcaattatttatttttcttaagaataattttaccagtttctcattaaagattcctttgaaggatgagagaaagcataagctaaaacattgtctatgaagcaacatatcgatgaatcaatacagcagcaattagtttataaagaaagagtggcccaattggaatgcactaatgattagattagagtccattgagaaagataatgcatccctgaagtattgatgccaacaagaaaacaagtagtgtatcaactttattctttgagctacttaaagtctataacataagagtagacaggaatataaataatatcaactagttaaagtctattcatattgtgaaacactcattctaaaaaccatgcattcaactattttacaaagcaattagttaagatgcctgactagtaattgaaatccttgctccttgaatctgttttaggtccatatgcagttctacgccagaacaaaaaaagtttaagtatatattttaccaaaatacaagattgaacaggtgaaccaaagattgaacagtgctaagttatcaatgagctcaatgaaattctaaagtagataggtactcaatgaacaataacatgtataaagttgtgtgagccatgttataaatgtttgtttctctaaagaatgattttacatatgcaaactgttaattacaatgcttgttgtaagcaatgcctgggtaagaatttctcatgaactcataagtcttataaataaacctcactagtcttatcatgtaaaaaattacgggatcaatattgagacagagggggttactttccaagtcccaaccaaggtggtctcttccctcccttcgcttgcaacatgtaacaccccgtaggcctccggtgcgttatcattaatcgtatcagtttagtgcttaaaacatcaatttaaatctcagcggaagcacactcaatgcacaacgcatacaaagcacaatatcacagcctcataatccaattatcactagaacggactgagtttcactcaaagcctcgttcaattagcctcttaggctcaacataacataatcaaggctctagcatgtctgatatccaccaatatgtgactttacaccagtcacccatgcaacctcagagccaagattcaaagtcatctaaatcaaaatctgaaagctaatcattcattattaactcgctctgagcaagtttctctactggaccctgggctaattctagtcctagctcatatgggtcactattcgcaggaaaccccaaatcccaaattaaccggagaaactcgagtttcttacctcagcgacgactagaaaagctgcaggactgctttcctaagctctgttgtctctgctaagccctgattcctcaccaaactcaagttccaggggttttcctcccaagaggaaatctcaccaaaatgggtttttgaaagaaaaagatgaaggattatagcttcctcagagtttctctcaagtttcacagctaaagggacgtattaaggctaatatataaggtcctaaaagcttggaagtagctccaatggaggttgggaggtccaaggaagaagaaaactggttttcctctcctttttctgcatttttgaccttaaatagtggccctgctcgagctctggcgcgatccgcgccagctccggtgctacccgcaccacaaaggcgatgggtctggcgcttccagcgccactctcgcgccttcagcgccagattccagggactctagcgctctcagcgccacacctggcgccatcagcgccgactgggaaatctggcgcccctggcgccaactctgacgcccctggcgtggacctccaaaaaacctggcgcttagcgccacattccagagatcatggcaccgtcagcgtggatctggtgctctaggcgccactttctagtggtctagcgcgatcagcgccaaccctggtgccatccgcgccacacccttaacagggttttctgccaaataacttggcacaaaagtgagggtccttacattctccccttctttttaggaattttgtccgcaaaattcagaatcatacctggtagccaactcgggatacatctgcagcagctcctgctcccgctcccaagttgcttcctcaggcgtcctgccttcccactgtaccttgacgatggaaatggtcttcttgcagatctgcttctccattctgtccagaatcctcaagggccgtgtaggactcgtcagattctctcttatctggactgtgtcaggctcaaccacgtgtgaaggatctgccacatacttcctcaaccgagacacgtgaaacacatcatgcagccctgacaacgggggatgcaaagctagcatgtatgccactggtcctattctctaaagaatctaatatggaccaatgaacctaggactcagcttcctcacacccaaagctcgtcctacgcccgtcactggagatagtctcagaaacacatgatcaccctcctcaaactgcaagggtctgtgcttctgatcataataactcctctgtcgactttgagccttcatcaacttgtctctgatcatcttgatctgctcagaagtctcttgaagcatctcaggtccaaggagctgtctttctcctacctctgtccaacacactggagtcctgcaccgtcggccatacagagcctcataaggtgccatgcccaagctggcatgaaaactgttattgtaggaaaactccaccagaggtagatatctgtctcagctagcatcttgctccaagacacaagctctcagcatatcctctagagtctggatggtcctctccgtctgaccatctgtctgaggatggtaagctgtgctgagtctgagctgggtcccaaaagcatcctgaagtgcaccccaaaagtgagagtgaacttaggatctcggtcactgataatactgtcagggactccatgcaacctcactatctccttgacatataactgggccaacttctctgtagtgtagtcagatctcattggcaagaaatgagcagacttggtcagcctgtccacaattacccaaatggaatcacatccactctgagtcctcggtaatcctaccacgaaatccatggaaatgttgtctcatttccttcaggaatctctagaggctgaagcagaccagatggtctcttatgctcaatctttaccttctgacacactaagcacttggtcacatgttcagctacatctctcttcatccttggccaccagaaacttttcttcagatcctggtacatcttggtggctcctggatgaatgttgaactggccctgatgtgcctcagataggacaacatctctcaactcaccctttggcaccacaatatgactgtggtatctcaccaagtcctggtcctcccaagaaacatcctgttggctaatcatggctctcacagcctcatcctgctgctgagcttctcggatcctcctgatcagctcattatccaccttggtcctgctcaactcaagaccctgggcaccttcagtcactgtcaggtgcatgtctctgaattgctcaatcagcttgcaatcagagatcatcaaacatgcagcagtcacattcttcctgctcaaagcatcagcatccacattggccttgcctggatggtatctcagctcaaaatcatagtccttcaggaactccatccagcgcctctgtctcatattcagctctttctaatcaaagagatatctgagactcttgtggtcactgaacactatcaacttggcaccatacaaatagttcctccaaatcttcagagcaaataccacagctgctaactccaggtcatgagtaggataagactcttcgtgaggcttcggttgcctagaagcataggcaacaaccttttgatcctgcatcaacacacaccctagtccccgcttggatgcatcacagaacacctcgaagactccttcaggatcaggaagagtcaacactggagctgtggtcaaccgttcttttagcttatgaaaacactgctcacactcatgggtccagacaaaaggaacccccttccgtgtgagtcgagtcagaggtaccaccaactgggaaaacccctggatgaacctcctataatagccagccaatcccaggaaactccggatctcagacacgtccttgggcctttcccaggacatcactgcctctatcttgctgggatccacagaaacaccagctgctgagatcacatggccaagaaactttacctctgtcaaccagaattcacacttggccaacttagcatacaactgcttgtccctcaagatctgaaggactgtcctgagatgctcgacatgctctgcttccgtcttggagtagatcagaatgtcatcgatgaacaccaccacaaactgatccagaaaaggtctgaataccctgttcatataatccatgaacacagctggggcattcgtcagaccaaaaggtatgacttgatactcaaagtgaccatacctagaccggaaggctgtcttaggtatgtctgcaggcttgatccaaatttgatgatatccagatctcaggtctatcttggagaacactctggctcccctcaactgatctagcagatcatcaatacgaggcagaggatacttgttcttcgtagtaaccttgttcaactgcctgtaatccacacacagtctcatactgccgtccttcttcttcacaaagattaccggtgctcccaaggtgaaacactcagtctgatgaactgcttggacagcagttcctccaactgcaccttcagctccctcaactccagaggagccatacggtaaggtgccacagagattggtcccacaccaggaaccaagtcaatggagaactctatctccctctctggtggtagctgagtgatctcctctggaaaaatatccacaaactcactcaccacaaggatctaagacaaatcatcactaggcttatcctctgtcacacccaagaagatgtagccctgagctccctctctgattgccttgcgagcttgcaagactaataggaatacagaggaactcgaacctgactcgtcagaaggcacaacaacccttttctgacaacagtctagcatcacaccatatctggtcatccagtccatacccagaatcatctcaagggtaggcatcgctagacagaacaaatcaatcacataggctctgtcctcaaagcaaaactgcacgtccttgcagtacgtgctcacctgacatctctctctagatgccatggtaacctccatcggaggggcaaaactgatcttaggtagtctgagcctatcaacaattacatcctgtagaaggaatgtgtggctccagaatcaaacagtactctgacatcacaatcatcgatcagaactgtacctctgataagatctggagctctagcttcctctctggcatctacagtgtacacccggcctgctgtgggtgccgtcatctccactagagccgcctgtgcctgtctctctgtctgtgggcactctctggatatgtggcctggcttgccacatctgaacatatgatctggcctgtagaacatgctcccagatgctcctttccacaggctggacatttcaggataggtcttccccgagctgactccctcttgaatctgtcagagggtgcagagactctcaacatcttgcccttaccctttccgggtgggcttgaaaccctgagcctccttccctcctgtttatctgaggaagtaggcggtctgcctctctgtctctgctggatactctccacttggcgactctgactcaccaaggtatccatatctcgcgacccaagaccgaccactagtacctgaatatcatctctaagtcccctcaggaacttagctgctagaatctcagcttcaggcataggtctccggaagtgtgcataccgggccagctcattaaactgggctagatactcgtccaccgtcatggtcccctggacgagtccatcaaactccgcctggttctgctctcaggcgtctctgggaaaatatatgtccaagaaataggcctcgaacagttgccaggtaatcacctctccccggcctctcagaagtgggacttgaaaaacaaatgaatacttaaaacaaccaagaaggggggtgaattggttgttaaactttgcccaattaaaatttaaatcagagtagccacaggatctttatcacttattagaaattcttttgataccagaaatcaattttcaatcaactccccttttcaagaatgcagaaaacagagtatctcaaactgtgctttgaatatgattcacaaacaatgtaataagcatataaaactgagaaaattaaagaacacacagattttatagtggttcacctcaaacactacgaggctacatccagttcttcactcaaaactagagagaagttccactattgcaaaatattctttacaagcaattacaaatctctctttgtcaaccctagacaaagttcagcaatctaaaacactattagatccttagagacacccctttcaacctaagaactctacccagttgaaaaacccagagaaacactatctcaatgcttgaaagaaacccattacaatagagttacaagatttcactattacaaataaattgtaaaacccaatcactaagtaagaaaagatatcacctgataatccattgatgaatgaatatgaatgaataacagatgactatgcaaattatcacaccactgatatgcagcttttcttgactttgattgaaagaagaaacttcaacacatgattttcatgagtaattgattctttgaagcttctacaatgtttctttctcagaattttatcactaatgaaagcactgattgtttgtgaatgatcactcaacgaaaatctcaaacgcacttgataaatctcttctttttttttttctgtcgcagtgacttctatttataacagaatttttaccaaaaataatcgattaaataagttcctgtaatcgattatttcgactatgtaatcgattaatccaagacagtaatcgattaaaatgcttattgctcgttcaagattccaagaacgaatagtttaatcgattaaaccgatacgtaatcgattaaaccagtaagttatgatttttctgtttagaccaattaatcaattatgatttcctgtaatcgattaaaaccgaatgacagtttttaccaaaacacatgtgtaatcgattacaatatttggtaatcgattaagccagtcattacaactttctcattcttgcctaagtaatcgattaaatcgatgtgtaatcgattacaatgctcatggcttgtatatagaaggctctaagaacaaaataatcgatgtcactaatctggtaatcgattatttatgtgaaaaatgatttttccaaaaacttaagccttttcaatcttcctaaattgattttcttgattaacctcattaatctattaattctatatgaatgacttaagaatgatatgcatgcttggattatcagatcatatattttctttttatacaatcaatttgactctctaaagattcacatccttgattgttgcgcgattacggcaaatgaatacggcaagtgcaccgatcgttaacaagtaataaagtaggtaagtgagttatcgtctccacagggattggggtaattttcacagtaaaattaattctaaaaatgattggaaaataaaacagaaaataagaataaagaagtaagtgttgagttgtggttgattatagaaacagaatttaaatgcaataaaaatataaagaagttaccaatggaagaaacaattgtggtcaggcacaatcccctttgttcctacctccttcacttgattggtttattatcttaagtcacacacatgatcaatctttcctaaattcgtaaatcctagagctaaccaagagcataaccagcgatttcaccctttaattcgatcgagaaacctaaacccttagtgaatctgtcaaactaagtattcaaagactaaacccatgtgatattgttatgattattcagaaatacatctttcctaagttagttaatccctaattccttagcgaattaaccctttaacctgaatcgaagacccagttccttggtgaaatctatcaaattaagcatacaaagactatattataaggtctgtagccacgcatccctattcctaggcgaagaacaactattattctaaacaagtcagaaattaaaatcccaacgtgtccattgcgaattctaaccctcaatacttaaatagaatggccaattccaattaagaataacatgaataagcacagagtagaataaaataatcaaacaacattaatttcaataccaagtcaagttacaaaggagttacatcagttcatggccttcccacaatacaagctcagcctgccataggcttcaagaacccaaaagctgtcaaatataacattcttgatgacctagctttgattcttgacttccaatgatagagagaaggaaagaagaatgatagatggtgttggtgtgtgttccagccccccccccctttgctctgttcagaggcctcatatatatagaaccttttaattacagtaactaagccaaaagcctcaacaattttcgaaacaaatcttttaaaacaggaaacaatttcaacctcacgcgacccgcgcgcgatctcgcgctagtcgcgtggaatggccgaaagaatggcgcttgtcacgtgggacatggcgcttgtcgcgcggcttggcagaagagaatacccttaatccttgaggtactggcgcgactagcgtgggacaccgcgcgagtagcgtggaactccagattttgttttcttcttttgcttgcctttattctcctcttttaagccctgaaatgcataattggtattgacattagataaaatgaaataatattaataaactagctaaaaattaatctaaatcctaattatttaatcaaaacataacctaaaactatcctaaaactaagatgtgtttgcaacacatcattgatcattacttagcttcctttgattcttccatcttttgcatgttgaaagcacaaaacactcatccatgatcttcattgatgctttgtttcatctgaatcaacaatctccccctttttgtcttttgacatgccaaattctcaaaatcttcaaattgattgaacatgtagtcctgtaatatgtagtcctgggaaatttcttattcttcaattgattcaaataaacatattgtttcagatcatctttgatggaactttgcaagtacctgtacctttcaaccttctttccagaaatcaagtgttaaaatattcaataatatttaaacattcaagtccagatttgatttcaaatttctccccctcaattatagtatataacattcaattcttataaacattcaattcttctagtaaaaaattaaaatctccccctatctttttagtttcagaatttttgttactccccctgaattattgcaatcttgaagttttgatcttattctcttattcttattctattttgaagttttgatcttattctccccctatttggcttgttaaaagtcaaaaacactaataagcacaatgatcaaacagagaacagagaataaaaagtacaataatccatcgataaagcaagtacagagagtaaaatagaaagagaaaatacaaactttttatctgaattcataaccaatagaaagcagatcatacaaattctaaaacaaaatacaaatctagtgaatggtagatcagacaaaaactaaatctaaggtgtatttaggaagcatctaattctgttaggccctagatattagattcttttaatttgtcttcactatcatgattctttagccaaagaaattttcttgaagcaccagcatgatctcagccttgaaatccttttgaaaggatggcactccagacttcttctagattttcttatccttttgtaacaaggcttagacattgtgtctgaatagaaaagatgccaaaggcagagatggctagtgatgcaaattcagaaggctttctatcctctatttataggttggattagactctataagtctctaaaacagtccaaattcaaaggtcacaactgatggtacgtgtttaagagccttgaattcagtttcactaataaatgaccagttatgaatttcataaaacgcgtcagaatacatgcaacagatcaaataatcgattattatgtagtgtaatcgattatttcagttcaatttagctttatgttcaaaaataatgtaatcgattctttttatcaattatcagaggttgaagacaacctataatcgattctttttatatagtaatcgattattttaagtatagtcatgaaaacagtgtatcagaactataagtaatcgattatcccgtgtggtaatcgattaacacagacagtttatttcaagtcatatacaaggtaatcgattacagcttttcagtaatcgattattactgactcgtctgcttttgattttttgttctttaacaatagtaatcgattaattcgaagtgtaatcgattattccagagagttttatcttctgaaaattagaagaataatcggttacctttgtttgtaatcgattacaaacttacaaaattcattccagtatagggctttaaagtatttaatcgattaatacgcagtgtaatcgattgtctcagggcattttacaaaacatagcagtttagcagattatttctcaatttactacacaatggctatccatgatttatcaactcttcaaatagcacataaaccacaaacaagataagctagttaagattattctcatcaagaattcctagcatgtttcttagtgtaaagaatctatctctagcaagtggttttgtgaaaatatcagctaattgattattagtatcaatgaagtctacctttatgttacctttttgaacttgatctctgagaaagtgatgtcttatctcaatatgctttgtccttgaatgcatgactggattctttgatatatttatggcacttgtattgtcacacagcagtggtattgcattaagttccactccataatcttgcatttgttgcttgagccataaactctgtgcacagcaacttccagcagatatgtattcagcctcagcagtggataaagcaacacatgattgcttcttgcaatgccatgaaataagagagcttcctagcatgtgacatgtaccactagtgctttttctgtctaatttgcaacctgcaaaatcagagtcagaataaccaactatatttaaagaagcacctttaggataccaaagtccaactcttggtgtagctttgagatatttcaggatcctcttgacaatagtaagatgtgactccttgggattggattgatatcttgcacatagacacacacttaacataatatcaggtctgcttgctgtcaaatacaggagtgatcctatcattcctctatattttgactcatcaactttcattccatgctcatctgaatctagatatgttgatgtagccattggagttgcagcatctttactcttctccatttcaaactttttgataatttccagacaatactttgactgactaatgaatgttccattcttcatttgctttatttggagaccaagaaagaaggtaagttcacccatcattgacatctcgaattctttctgcatagttgatgaaaaatctttgcacaatagatgattagttgatccaaatattatatcatccacataaatttgaaccactaagaaatcatttccaagccttttgataaacaaggttttatcaatactgcccctagcaaaggattgttcaagtaaaaacttgcttaatctttcataccactgtctaggagcttgtttcaatccataaagtgtctttttcaatttataaacataatcaggatgtttaaaatctttaaaacctggaggttgttcaacatagatttcctcctcaatatatccatttaaaaaagcacttttaacatccatttgaaaaagcttgaaatcaatgagacatgcatatgcaagtaacaacctgattgcttccaatcttgcaactggagcaaaagtttcctcatagtctatgccttcctcttgcttatagcctttggctaccaatctggctttgtttctaactatgattccactttcatcaagtttatttctaaaaacccatttagtgccaatgggtttaagagatgatggtctaggaacaagttcccaaacttcatttctcttaaattgatttaacttatcatgcatagcatgcatccaatgttcatcacatagggcttgttcaatgttcttaggctcaatttgtgaaacaaaagccatatcacaacagagatttttaagtgaaaatctagttgatactcccttttttacttcacctattatcttgtccattgttaagtctcttgttgttctctattcttttttgatttgaactggagttgtggattcattttctgcttttgaatattcatttttgacagaggtatctttaatttgttatttccagctgacctgcatcatcattttctttttcctccttagaggtgttagtctcatcacaaaccacatgtattgattcttcaacgcacattgttctcttattgaacactctatatgccttactatgtaatgaatatcctaggaaaattgcttcatctgccttagcatcaaattttccaagtgattctttcccattgtttaacacaaaacacttgcagccaaaaacttttaaatgagatacattaggctttcttcctttgtatagctcataaggagttttctttaaaatgggccttatgagagttctattcaaagtataacatacagtactaactgcatctgcccaaaaatacttaggtaaattagattcattaagaagtgttctagctccttcttcaagagatctatttttcctctccacaacaccattttgttagggtgttcttggagctgaaaaattgtggttgattccattttcttcacagaatttttcaaaaagatcattttggaattcaccaccatggtcacttcttattgaaactattttactgcctttctcattttgagtaagtttggccaattttcgaaaagtaaggaaagcatcacttttggatttcaaaaacatagtccaggtatatctagagtaatcatctacaatcacaagtccataatagtttcctcctaaactcatagttcttgaaggaccaaataaatccatgtgaagtagttcaagaggtctagaggtggaaacaatgtttttgctttgaaaagaatttttagtttgtttccccttttgacaaggatcacagattttatccttctcaaacttgagtttgggtaatccaatgactaattcttttcttatgagcttgttcatgtgatgcatgttcatgtgacttgctcttctatgccacagccaagtttcatccaatttgctgataagacatgaagttttatggaataatgcatgatcaattaaaagcacataaatgttaccttttcttttacccatgtgcatacctcactgtctttttcatctgatattatgcagctatctttgttgaaattcaccttgtagcctttatcacaaagctgacttatgctcaacagattatgctttagcccttccacgtacagcacactttttatcttggtttttatgttgtctcctatatttctttcaccaattattttgcctttgttgttatcaccataagtaacatatcctccttcttttaatgtcagatttgagagaagggacatgtctccagtcatgtgtctagagcatccactgttaagataccaaattgatgtccttgctcttagacacacctgcaaaagcaaatcagaattttattgaacgtacccaatcaaggttgggtccatatgggttagcatttcttttgatcttaggaatccagatgcaatcaccattaggcacaaagaatctcctagcatatcatttaaaagaagtgtgtcccttcttcatacaatagttgcaagtgacagattttgaagatttttcaaatgcagcaaattgattggcccttgagttcttatgccacttttgattcttctgttttggtggtacaaaaactgttttcccaaatgattttgttccacgtttgtaccccaaaccagaagtatcaccagcatacttttgcacacttaacatttcagctaagttgcatttgcctttataaaacttcctcaagagatcaatcaagtcactgtttttggctaaaagcaacatatatttttcaccttgactttgtttgtattcttcaaaatctttcaaaagcattttatacttgtcaacattgtttgatgaagaagcacacacacagtcatttaatttgtaacttgaaatcagtttttcattttcttctttcaagttgcaaatttcattttgcaaatctgtaattttttctatatgccatctaagatatcctttgagcttattattggcttttgcaagtttttgggcttcctcatacatctcttgaaaagcatgaatggcttgatcaagttcagaattcacctcatcttcttcactgagcagatcatcatcatcttcatttatgatggatgtaaaacacaagttagcttcctcttgctctgctgaagaatctgaagtggttgactcattatcttcccaagctatgtaggctttctttcctttagcttctttctttgcctttccttcagcttgctgcttcctcaagtagattgcacattcagtcttaatgtggcctggtttgccacactcaaaacacgtaaaattgttgctgctgtttctgttgactctgttgaatcgtttattcttgcctttcttcagaaatttgttgaactttttaacaatcaagttaacttgctcatcatcctcctcttcttcacttaattcttcctctttttcgattttgcttgctgcagccttcagtgctatgcttcttgttttcttctctgcatcttcacaaaatgttagttgtgacatttctaattcatattcaagaagcttaccaaacaaagctgccatggacatcttagataggtcctttgactccttgatggctgtcacctttggctgccatggtcttgttaagcacttcaaaattttgatgtttagctcctcagtatcaaatactttgccaagacccagcaagtgatttactatatgtgtaaatctggtttgcagttgtgaaatgctttcattggagttcatcttgaacatttcgtactcatgtattaaggcatgctttcttgaccttcgaacctcttctgttccttcatgagtaatctcaagcatctcccacaattcttttgcattcttgcatctcacagtcctgaaaaactcatcagaggaaagtgcagaagtgatcatacttttagctttaaaatcatactgtgcatttctttgttcaacctcagtcatctcatcccattctttgggaaccaactcattagcaacagttttcttaggaatgaagggacctttttcaatagcattccatgctccagggtcatttgattgaataaagattttcattctatttttccaaaaactgaaatgttccccttcaaacattggaggtcttttcaaagaggcaccctctctaaaggttatttgtgaagtattcatgatgacttttgaaaagaaaaagtgatcttgagtaacttacaagaaccagctcttgatgccaattgaaaaacaaatgaatacttaaaacaaccaagagggggggtgaattggttgttaaactttgcccaattaaaatttaaatcagagtagccacaggatctttatcacttattagaaattcttttgataccagaaatcaattttcaatcaactccccttttcaagaatgcagaaaacagagtatctcaaactgtgctttgaatatgattaacaaacaatgtaataagcatataaaactgagaaaattaaaaaacacacagattttatactggttcacctcaaacactatgaggctacatccagttcttcactcaaaactagagagaagttccactattgcaaaatattctttacaagcaattacaaatctctctttgtcaaccctagacaaagttcagcaatctaaaacactattagatccttagagacacccctttcaacctgagaactctacccagttgaaaaatccagagaaacactatctcaatgcttgaaagaaacccattacaatagagttacaagatttcactattacaaataaattgtaaaacccaatcactaagaaaagatatcacctgataatccattgatgaatgaatatgaatgaataacagatgactatacaaattatcacaccactgatatgcagcttttcttgactttgattgaaagaagaaacttcaacacatgatcttcatgagtaattgattctttgaagcttctacaatgtttctttctcagaattttatcactaatgaaagcactgattgtttgtgaatgatcactcaacgaaaatctcaaacgcacttgataaatctcttctttttttttctatcgcagtgacttctatttataacagaatttttaccaaaaataatcgattaaataagctcctgtaatcgattatttcgactatgtaatcgattaatccaagatagtaatcgattaaaatgcttattgctcgttcaaaattccaagaacgaatagtttaattgattaaaccgatacgtaatcgattaaaccagtaagttatgatttttctgtttagaccaattaatcgattatgatttcctgtaatcgattaaaaccgaatgacagtttttaccaaaacacatgtgtaatcgattacaatatttggtaatcgattaagccagtcattacaactttctcattcttgcctaagtaatcgattaaatcgatgtgtaatcgattacaatgctcatggcttgtatatagaaggctctaagaacaaaataatcgatgtcactaatctggtaatcgattatttatgtgaaaaatgatttttccaaaaacttaagccttttcaatcttcctaaattgattttcttgattaacctcattaatctattaattctatatgaatgacttaagaatgatatgcatgcttggattatcagatcatatattttctttttatacaatcaatttgactctctaaagattcacatccttgatcattacttagcttcctttgattcttccatcttttgcatgttgaaagcacaaaacactcatccatgatcttcattgatgctttgcttcatctgaatcaacaggactgtggtcttccaccacttatgagcgtccccctggagcatgtaggttgcatacaacaacctctggtggtcggggcactccatcacctcaaaaatcttctctagggcttgcagccaccctgctgcagccactggatcatagccccctgagaacactggagggtcatgcttcctgaatgtaatcaacatcttccttctggctgctgcatcactctcagcctctacctgggacatctggtcccttcgctgttggctcccaccagcctgctggcgactagcctcgccctcatgcgcaggaggtgtggaggatgctttgtcatccctcctaaggttcttcacctcctctaacaaatcctggttagccttcatcaaggcctcattcacctctcgggtggcagccatctctcgctacatctccccctgagtctgtcggtttgcagccatctcttgctgcatatctgcttgcatctgtctatttgcagctaactcttgctgcatggcggctagggcagccgcaactggatcaggctgggcaccggtagccccactggtgcctctaggtctcaccatagcactacacatgtacatcacacagtgagttgatcaggcccacagttaatgtacccccatgtactgctcatgtcaaacaggtaccaaacaaattccatacataatgttcttatcaagaaacctagctctgataccatcaaatgtaacaccccgtaggcctccggtgcgttatcattaatcgtatcagtttagcgcttaaaacatcaatttaaatctcagtggaagcacagaatcgcttttcttgattcattatgtatggaataaatacgtcacagagaatacacatgcaaatcatctaattcacacccctgctgatccagtttatcatatcaattataacggtaggcagataaacaaataaccagtaactatactcaggaggaaaaatatctcatatcataatcagttctgtacatatatatatatatatatatatatatatacacatcagagtctacaccaccccgtggtgatacaaaagaatatcagccctcacagagggtatacagaactgtacatatacaggtgtacacacaccatcccttatcaagggtacaaaacaaaacataacaaaacggagcctttaagctccttctgctgctcctcagtcaagcaaccatgtcaacactagggccgcctgccctgagactgttcttctctgctagaagaatcacctgaaatcataaatccccactcggggtgagatacacatctcagtaagctcagggtccttgggaaatcattcccaccctggcccactatccacaatgcatacacaaggcaatcacacaacctaatggcccactggccctcatagcaacatatcaagcatccaaacatggcgcatctcatcaacgcctggcggatctcatcaatgcctaaatcacatggcagagaaccctcaatgcctagcggagaaccctcaacgcttaaatcacagggcagagaaccctcaatgccccaaacatatggcggagaaccctcaacgcccaaataatagcataatcaaaatctcaagtgcatacataacaatttaagcaatgtaacacccaaatgcatgcatcatgaatcatgaccatcactcccccggagtgtggtgtgcaaccatgcgggaattcatccccagggacactgaacttacctggcaaggtctcagtctacggtccggtccctgccctgtggctcccgccactaatagtctcactatcacgccctaatcagggtatatacaatatcatatcaaaacaagcccacaggcatacaattcacagagcatatcatatcagaatttcccctatcctagggttcaatcaagctcagccactctaagctatcacagaccttcacaaggtctctcaaggctgcctataaagcatctgagtcatcacagactcaatgcacaacgcatacaaagcacaatatcacagcctcataatccaattatcactagaacggactgagtttcactcaaagcctcattcaattagcttcttaggctcaacataacacaatcaaggctctagcacgtctgatatccaccaataagtgactttacaccagtcacccatgcaacctcagagccaagattcaaagtcatctaaatcaaaatctgaaagctaatccttcagattttgaccttaaatagtggccctgcccgagctctggcgcgatccgcgccaactccgacgctacccgcgccacaaaagcggtgggtctagcgctcccagcgccactctcgcgccttcagtgccagattccagggactctggcgctctctgcgccacacctggcgccatcagcatcagctgggaaatctggcacccctggcgccaactctgacgcccctggcgccaactctgacgcccctggcgtggaccttcagagaacctggcgctttcagcgccgttctggcgcccctagcgccacattccagagatcatggcgccgtcagtgtggatctggctctacaggtgccactttccagtggtctggcgcgatcagcgccatctgcgccacacccttaacaaggttttctgctaaataacttggcacaaaagtgagggtccttacacaacatttttttatgtccctcacttgtgttcaaactcatctttaacaaaaaaaaaaaaaaaactcaccttggcttcacaaattgaggaacccaggcaaagggtcagaatcaatcagttcagagtcagaactgaagtaatattatcaaaggacaaggtatttgacaaagaaaaccaatattatgaaaactatttactcgaggtcacagtgatagcagatacaagaggtccatatacacctcttataagaatggcattagttcattttcctgcccaggataagtggatttccaaggtgttgtttgtaacattcacattaaactccctagtgattccctttccaactccaccagcttctttcgcaatgttaaaatctatattttcgccaataaaatatcccagatctagagaagaaaaaacaaatttaaactataaccttcatctatattttcatggtttaacaaatataggctcaggctcttagctatctagaaaggtaaatggtacctgaagatccatttgtaagcacaacaacattttggctgtcattaatgttctcttcattggagctgccaccatcacccttagttgcccagttgcatcgtatttgcctatatgatgcaggaaatcacaagttggtatgaacaaaaaacatgacacagaagcagggtacaaatggcacaaaattacataacatgtctcacctgtcatatcatttattgcagtttgggcatcctgcatatcaatttcattaagacatatcatttcattaattcagaacataattaacatagctacaccaatgaccaacctagcatctaacagaaaagcagtaaaaacaatttgtatagcatttgaaatgaagattgtatatattatcataagctgttttgtatatattatcatatcattgccactttcgtatcatacatatattgcttaaatctattttatcgtgcagaacccgcaatataaatatagtagtcgggcacatctgatggaacttgaatggtggtgaaagcacaatacttgatttctagttgcctgatttctgtctctgaaagctgaacctgtatcccaggtctccctctgacttgaagcagcctattgatgataccatcaagaaccccacgttccattccttatgccactcaaagataacaaatttaagcaaagaacaagatcaaagtaagaggagaaaaaatgcttacaaggataaagaccaagaagtttatgttgttgagtcatttatgtagcattccctaactgcagcacccaagttaaccatccttatttccatttaacaaacacagaatctaagaccaataacacaaaaacatacaataccttagtcactagtgaaggatttaaataatacaaacaataagcaattaccttagtcaattgctggagctaccaagatcaaagtccatggtgtaatcatagtcaattgttggaattacagaagccataaattttaggaataaaaataggtacatacagaaataagtatatatgattatatcatatcagagtatctccttagtacgcgctgtcacttcaccacgagaatcttaggatgcaaattcaatattattaaacttgaacatacttgcaaggccggaaatcaattaagtagaataatagttaatgaatcttaatattttttataactatgttatatatttgtgtgaaatattagtcaattttgttgaagagtaatttttatcgaggaatttaattacaatttttatggaatcttttatcgtaatcacatttttttttcaatttataagacataaatagattcttcaagattaacaccaaaggctctaatgatttacctgccagtgggcactgcacaagaaagactagtacaatcatactaaattgcagtgagtgacgagtgatgactaaggagtatgcatggggaacaaaatgcaagtaaaccaattaaatcaatcagactcctaaaattatgttacctgggtttactctagcaaatatgccataccaaagctcatccgttataaatgaagttgctctctctactgcaccaacataaaccccaggccccaaagtgggtggaagaggatgaaacatcttttggttcggataatctaggttgactgctacatgacgatttgtaagaaaaccaacttgccgactgctagtttggcttttcatgatggcacccaaagttccatatgtctcttggcttgccacctaaactaagaaagtgagtggttagaagtccaatatattcaccaaatagagcactacaaaaattttctactagaaacgcttatgaactgcattgatttctgaaaacaccaagtgaactgttctctcataacaagatagatatttatgataatgatggatgacttagaatgttgacaacttgacattcagctgacttaagaacagtaaaggtagatgatgtatatgaaggaaagttttgcaacaatccaaatttgcggaggcctagataagactttatatttaacaatttattcacaaattttacttatcaggtggatcatggtcaagtgagagtccggtagtttaatttatcgtacacattgaatttgtacaccatattattttcctggcaagaatgagatattgttactactctaccaaagaccaacaaaaccacaaggtctgcatttctggttttcctaaattttttgctacttcaagccataggtctggccattgacattccaataatgagattctaaaataaatgacattcagaaacagatttatggttaaattccatgtgaaatgggttttttgtttttctgtgtgtgtgtgtgtgtgtgaattccataaatgcaaatcagggaggaaatcaaatatttaaaccattgtttagaagcacagaaatccatctacagaaactggtaaagaattaaaagaagggaagataaataaaaagtttaaccacataagaagttttagattaatacataaaaaattatgaaacttgaaatgtaagatcctgaaatttaaagtcaagattcaaaagtggttatatcactaagagtttacgatagaagatcaagcccagaaacatatcaagatatcagcattaacttctttgaggttaaagttagtctttagaaaacttaagatgctttattacaaactgcaaagttagactcatgcagaaaagactaactagaacaaacctccaaagcaaatgaatatgatctttgataaaatttaaaggacagtagttacactgtggtttttaagtggaaagcctaaaaatgttcctataaccatcgcatatacaaaatagtcattaaatcaaagataatcttttgtaaaccggattggtccttccatacaaaacattaactaagaaagcacagaaacacttgagatcctgaaccaatgcatggatcacccccacgcaagtcatctacgatctctgtgtacagctactcttttggaactggctcagatgcaccaaaatatgacaattccaccacatccacatcacaccatactccaccaggtccctggttcacaaattgaacattgattttaaatgcatcctaggtactagagaacaacctaaaactgtttgtgatatatatatatatatatatatatatatatatatatatatttcaaatttaattcaagcgagttcaatttggacatcttcaagaacctcaagagtagtaggtagacactggattggacgtccaagggtttcaggtagcacccccttttgtagatttaaaaaatagtttgctctctcttcagtagcatcattcaagcggcttagccatgagaagtaagcagcactgctctcacaatgctgtccagctgaagcaaagggttgaagcattggtggactaagtgaaggcagattagaatgacaacaatagtttctttcaagatccaaagcagattcttctgagggagtcgaaccagagcaacgacctctcatgtttagcctggtgcactccatcttttgatcaacatgaaataatgttttatttaaacagaaggggactcaatgcaaaaaactggcaacataggagacaacaaataggacctctagcttagtttaaacttcaaaagacaatgagaatgggcatcaatttagatcaaaagaactaaaagtttgctattaattgactaaataaaagtcagaccatagatttagcacacaagcctataatatctatatataaataaaagttatttgaaattaaggagaaagcacaaaagaaaacaacaaatcaaaatatcaaactctaaattgcttttagaacaagtaatagaaaggataaggaagcaacagtaaggaagattaaaggaaaaaccagattatattagtgtaggtgtagtaaggttaccacctatgaactagtccaatctataacacgatgagtaagaaaatgatcccatggtattactatatacataatatctatggtcaatatgtatgaaattaatattgctttaaataaaactgaacaccacactacataatcaaaaaagcatacaatatatagtcactactcactaccatgaattgcaccaacaaaaggagtaataaacttttaagtagagtaaaatcttgatgttccccactaaatccttaccaatcaacaagtcaaagaatgaaaacatttaaaaacctgacagaggcatgataaaacaaataatattcctctagcatgcggaatctgacatccacaacccttctaattctcagattcaagcaaatggaaagtttcaaatttagcaatacaccatgatgaacaacaacaattaaaccaagctaagcaaagtttcaagcatcccaaacagtgcaaaaagggcatgattaaagtccaagacatttcatccataaaaaaagaaaagagaaaacacaattagtattcttccaaaagacaaaaaggcatgcccttgttgaattcccaacatggtttcatataaagcaaagatttttcatgtttccacagaaccctagttgcccaaaacaaccaaaataaaaataaacaagagagagaaagagagagaccagtttaagagtagagtggagagtggaagaagagcctcattgtttggaaactgctgaacaacaccagctgtccgagacattgacacttttaagaccttcccatactgtcgccttcgctcatgaacttgccgccgattagggttcatgtcgtggaggatcagaaggtgttggggattgaggagcagttcgcgcagatgggggttggtgtggggcagaagcagcagtaggatgagggtctcttccccgcctccgccgtcggttcccgcgagtctctccgccgtgggtgtgccgatggggccgagcacggtggttgctggggagacgagaccgtcaaaggtgtctgagataagcaaagaataaaacgaagagggggaggaagaggcacgagaagatgaggaaggaggttctgcgaggtcccgcgcatttcatttgattgtagtagggcacgctcattttccctaatttaattttaaatctactgctacaaacaacgacagttttaaaaataaccgacttcttttattaataccataatttcaaaaatgtcaccgcgtagcatactaggtttccgtaatacccgtcgttgtttttaacctcatatttacgataatgccaccgcgtagcatactacgacggtttccatataaccgtcgttgaaacgaccgcatttacttcattttttattatgtatttgtgttcatttgctaaaaattttcaaaaaacagaaggataaaagtttcaacaaaacttggttgattttaaaacaaattttaaaaatgaaggttcaaatgaaaattccaaacgagttttagagattataaaagttttcacgcgttatttaaaacatataatccatgacgttcaaacataccacacattccattcattacatatccagagtccatatataaacagtccgtagtacagtccatagtacatcgcaagtacagatcatcaaaagcatacaaccagcatacaaccaacatacaatcttcattctatcttctcgtacaacatccatctcactgttcttctgctcgcccaaataatttggggtcatcacaggtgtcaaccaccagacacaacacagggttagtcttggtaaacaaaatttaaatattaacaaactaattaataaatcaaatttaaatatacgtaaacaattatgaataagtcatttccacacacagaatttccatgaaatgcatgctcatcttattatatgatgcatgactgagatctcagcttaacgtctcaaaatttgtggccactgtcagataaccccaccctcaccttagtggaacgaactcccgtcaaggtagcccagtgtcgcgcaggagcatcactcccatccatgtgatcatcatggttaagtgatttccccactgtctccactacccccaagttaaaaacacgtatggaactcagtttagttatctgacacactaaacacctcttaatgaggatcatctcatcgtctcaattttaccctaccgggtagatgcacatgaagatgcacacatgatttattttttatcctttaattatttttctcatcatcttcatctcaaattctcaactcaatatcatctcatagttcacctcttaaaccaccactcatcatcttgaattgttcaaaatcacatatagatgttgtatttgtttcacgcgtataaattatttcccacgtttataaaagaacattattatacagattctttaattaatggcatacaggtttattaattatatagatttatttcttaacataccgatttgtttaataacagcttacaaattaacaacaacagcttacagattaataacaacagcatacagattaatacagatttattaattatacagatttatttcttaacataccgatttgtttaataacaacttacagattaacaacaacagcatacagattaataacaacagcatatagattaataacaacagcatacagattaatacagatttattaattatacagattctattatttaacattatacagactaattttttccacacatacagaatcatttaatttgctttaattttcagcaactatgtaattttatttacagaagtacaattaacctaaaaaaataaacaaacagcaattataaattttacaacagccaccatgatatccataattaattttaatttctttataactttcactaagacataataacttaaagttttctcaactccaatgctactatattcaagattacactcttccaatcaactacttaatattaaaaattaaatcatcctaattaatcattaagacaatggaatgaaaccatcatacaacaagataatttcaaacaataagaagttaagtacttagcttaattatggttgtttcattcatctaaataacttacctaatcaaacttgattctcttaatcttttcttcttctactacttttatttaatcctatttcaattctatttcaattcaagtaatcaattagttaagattaaattgaggtaagctaatacttaaattttatttaacaaaactcccccataccttagttgtttagttgaaattgaatcaagcttttccctttagtctaacttcacgtgaactcctttggctccttggaaaatttttttatcttatgaaagtgattgggtatgatggatacggttgagcttgtgaaaaggatagcaaaagggtgagtacggttagaatttggtattggaatgtgattaacaaaaagcaaatgggacaaaggaaagctacacggtttttcccttggctgattggaatgtttttgtgctggtacgttggtgatttggtttcctttggtgttttaaggattcaattaaaagcacaataaaggcaaatggggtaatagctgcacgttcagttttttcttggctgacccaagttcctttcatccaattcccttttatagaaaagtcaaagcaagcttcaattgttgatccacccttttcctcctataattgcacgaccaaatgtggctttgaggataagtccaacagatttttttttcacttgcatttatgaggagataagaattttatcctagcatttatgtagattctctttgtctcaaataatctcctaagctttatcttttcttgcttttgacttagtcccccactctccattttttttatgcatttcacgtgagatcctataatccaaaggctattatacaattttttttttccttcttgatcgtagccaacttcctttgattccacaatttttgcacagttgattgcttaattgggataagcttggattgatttttcttcttcttgcctttattacatattttctttgtctcttgtctttatctttccttgtattccatgaactagcataaatcttgttttcttggtgctcttaatttttcaaaatcactaaactatcttaataatttagtctatttaatccataatctcaagaaaattcctaaaatgatattcatcatttttctctaattttctagtgattagaataacttaaattgaattttatttcaaaaagtgtgttaaattttaaaaatcttattagatagtgaatgaaaattttcaatttgtgctaaagtgtttcctttaatccatattcaataagtaaaatattgggatgttacagtcgtcgtatgtgcgtcgtgaaagactttatttgtagtagtgaactatatgtaccatcaacattattgttaaagggtacatatttattacatatatactatctttgagtaaagtaattacttacttagtatcatagttgttggaatataaatgagataaagtttcacataaataaaaataaaaatttaaacattatataaatgaataaaagatttataaacttaaatttaaaagttttttttttattaaagtatagaaagtagatgacatataaatttgagtttcaaattttttattaatataaatcatatcggtatttaatgtctcatatgcagaaaaagagttttttttataggtatctctaccatcatttgatcaaaatatattggattgcgggagttcagattaatcccctcacatcttaaaaggctattcatttacaagttcgggccaacaagtcacggagaatttaaattttcaccctacgtacttcaagaaaaacacttatcaaaaagttggaattcataggaaaatacaaaagacaagaataacctaacaaataaacaatggaaacaactagtatttcagcctgcgatgtagggtattttttgtctttaatcttaaaatttagaaaaactaaccttatagaaaataaaattttaaagaaaaatatttttaaatcaccttcattttgtgtgtgtatgatttgtaaaaactttcattttggtcttacaaagtttttctatttgaccaaattggtcttttcattagatgttttactaacagttttgattttggtcttttcggtggatgcatttatttaggaaagaaagtaaaaggaatgtaaagaaagaaaaatagaaaatggtataatttttaaattgtttgataaggaaaaaaaggttaatttttttttcatccctataagtctataattgttcccataaactaacatgacattttcaaaaggttttatcttcactcatattttttttgggaaatttaacataaggtcatcatcctataattagttcaagctaaacacacttaaatatgaatttcttaagttatgcactaccaaaagtaaatgcgtcttgatagtatagatagtattgattaatttctttaagtcgtcgtcaaccatgtagtctcctgcttgcaaggtctttggatctctctcattcggctattattcatattcattcatgtatttctcccgctgaaagcctactagaagtcgctcattgtctgtgtctcatctcttttgcactaacaatcactcttcgtcctcgttagtgcctaggatgttacatgttcacaaacttctacttggttcatcctggaatcacaccatactagctaggagagacatttgttctcataccacttgttacgcttgactacttaccggattgttgattgtacccataaatcaacataagactttttagcgtgtattgtcttcactcatatgcttgttggaaaaattttataaaggtcattcatctcataattattgcaaaaatcaaacacatttaatgtggagttcttaagataaactactgaaaaatatgcatcttgttgatatagaccaataatattatctaattcttttaaataagttatcattaatgatagagtctcgtatttgtataatctttaaatctctctcatcaattatgtatttgatttattgatgtatctttccttctagaaacttgttaggagcgactcattttccatgcatcatctcttttaaccaatgatcggtctttgccctcatcagtgctcatgatgttacacatgatgccaatttcatacatggtcgtgataggatcactggataagaaaataacaaatgacttttcttgtcaaattcattctcagccttttatatatttttattagattgaaaaacgttagatttatcaacaaaaaaaaaaagttgttggaatgtaacagcgtctgtggcgttaacgtttctcatgggacggagtgagatgacagccatgagacaactttcatacatggtcaaagcaagaaggatcagtaaatataaaggacttttcttgtacaagtaattcttaatcttctatataattttttttattggtttgatatcaacgttagatttatcgtaattaaatttcaacttttcgtagatcacatgcatcaataaattgtcaactaagcatgttgaaaaacatgactaaaattaaaaccacattgttcatctccagtgtctgagtcaaacaaacaatatagataaatttataattaatatatgttgtgcgtcagatctagaaaatatattagaatggccacttgtaattgttaatctgtaacaacgttacccttaaaataaagtagaacctagctagcattattaggaatttcaaggtagttaacaacaattttagctagtaaaaaaatattatctcaactaccataaaagtttaagagtcatgcaagttggcttaaagaacattaattacaaacttttaaaatgcacaaatctacgtatgtattgtaaacgtttttaattacatgtgttaaacattgtaataattaactttactaattaacaaacataaaaccataactcctttaaaaaaacataaaaccataactaattaaaattgatatatgttattttacgctagttacatcaagcttttaattatatttcaacctgcagtaaaaaaaaatcaacctgtattgatgctcttaattattctaaataaaataaaatgagacaagtttcttctggttaaaataaattgatatcagaacttcttccttttttataaaaaatttagtagtatttgcgagtacacatgggtgacgttgatgttatcatgtttaaaagaatcaaacaatgaattctatattgattttaatatctataatataatatttgcaaaaggataaattttgaactttaaaatatcagtcagtccgtgaatggtaatattgtagtatgatgccttcaaataatgagtaaaagcaggtccactgtatacaagttgatgtgaacaaaaaatacagctaaacataccatgttgatcaagctagtacatgtatgcacagtaattaaagaaattgcaagataattaataatttatgaaagattgtaaatgaaattgtatcaattgcaaccaatatttgttaagagatgtaatatttagtatacactactacaaaactgccaacgttgttagatataagacgttttttccaaaaacatcgtcgttcaaaatgtgataatatttttgtaaataattgaatctttttaatgacgattttttaaaaatcgtcttagaaatgaagtttttgaagatagattttataaaactgttatagatatcaagggttcaaagatgattctataaagatcgtcatagaaatgaagtgaatataaaatcgtaatagatatatgtgttccacaacgattttttaataattgtctttgaaatcaatagcaatcaagcccttgtctagcacatcccttataaatccctctctcccacaatggacctccctcatcgtcactgacgatggagccatccaccaccaccaccacccccaccccaacaagaagaggagggactccaccacttcctctctgaaggcctctgatgtgttccctctccatctgtacctcatcaacgccatcttcttcatgctcttcttctccatcgcaactaacagttaaatcaaatccagagaaagcgaatcacgaaccctctactactagaaaaatggtatttttcgacatcaaatctacgacggttgctttaaaatcgtcttagaatcttatgcagtggcaaatttgtaaataaaagaaaataaacgacgatggttttgtaaaaaccgtctttcaaagcaagtgttcaaacatggttttgaacgcaagtattcaaagacggttatgtaaaaatcgactttaaaaacaagtgttcaaagatggtttttccaaaatcgtctttgaaattcgttttcattctggacgtttcgcttcctcttccctttctctctcatccactatttaatgctttttcaaaatttcattcactgcaaccaaaattttttcccatggcatcgaagcaaaataacgagaacgtgagatagctcaagagaggtcgctacccacatggtcgagcttgatcctaaggaaatcattctcatgagagcggctcggcggcagtggatgtgacgcgtcgaagtggtagcactaatacgacggcggtgatgcgtcggtggttggaggctgtggtgcttctgattgatttgttcggttacgagcttgcgttcctcggtgtggcgaaggaggtactaaaggtgaaggaggcacagagtggggatcgtcttcatgattaattattattttttagtttgtagatcttcttcacgtcctcaatatctccgttggtgagagtggagattgtctaaccagagctgctaaggtttcccttaacacctcacaaattccacttttttcttttcaaaaaagtattttttttttaaattttaatttctatttttcttgtaggtgttggaacagcttagtggccaaaccccaatgttttcaaaaggttagttctcaataagtttgtaaatggttagttcatatctgatgactatttttcttcttgtaggtgttggaacaacttagtggccaaaatcacatgattatttaaaatttgtaacagtacataattttgttaattaaactctgatgactatttggctgatttatttatctagcagtagtattttatttatcgtataataatatatgaggcgaaacctggacggcggcggcagcatgcgagagtacctctgcctcgtgcgaaagctcaaagttgggaggtcggagaaagttctgaagcacgacctctccatcttgaacgacctcaaacaacgatcctctcttaacttcgatggtccctcttcttaagcaactgaagtaatttctattattttttcgcttcaattctgtgattctgattttaagttgtcattttttggagggcaaaagaacccaaatagtattttttttaataaatatttaccgataaggggcgctttcaaaattatttaccaaaatggggcagtgtaacatgcctgaattaggcatgttacaacatgcctagattgggcgtgttgtaacatgcctaattcaggcatgttacagctgccccaatttggtaaataaggcccccccgctccgcagttccttcatatcttggcttccagtgttctctgtctctgctaaactgccaaccattctggttttgtttggttttttcagagatttttgaagttgttttgagtgacgagaagcatgagttcaagtggtgattctgttcgtgtttgagggattagggtttgctgggcatggttaggttgtgtttatggtatggtcatgtgacgatagtttgtggttaagggtttagggtttggtgggcatgggacgtgacgtttgggccagggttggggtagggttagctttcatggtcatgtgacgatggtttgcagttaatggtttagggtttggtgggcatggtgtgtgacgtttaggctagggttggggtagggttaggtttcatggtcatgtgacgatggtttgcggttaatgatttagggtttggtgggcatggtatgtgacgtttgggctagggttggggtaaggttggtttcatgattttggtttcaacttggcaaactgtttcaccttcttcatcagcttatgctcatagtcctcaaagtaaccctttaatccccgcaaattgctttcaacaacttggcaaaacgaatgcagcaaagcacttgttacaactgtgatcagtgaggacggtggtgttagtgttgtccttccaaatgccccaaaaccaaacctttctcacctagaaaagattcaactattccctctaataggaacatacagttcccttgtggccatggctcatgcggaatgaactcacgatatggcaaggactactatgcctgccctatcaacctaaccaacatcaacagtaaatcattaaccattaacgtgaaccccccaaaccctaaaagcatgaacctcgacgtacattgtttcgacttgtgccaaatcaatcatcatatacatagataagaagcaaaacacaacaagaaaaaatcacatgaccctgttatcgaggaattagggacttgactgacctggggagtcgaataaagtcacgggttaaaatgagtttttcattagttgtttccacttgtggcaagtccatcatcatatacacagcaccaatcacactcttcactcttcagtctgcattgagaagaagcaaaacacaacaagaaagaaaacgtctgatcatgtctttctcccattcaccttcttcatgagctcatgctcatagtcctcagagtaaccctttaatccccacaaactgctctcaacaacttggcaaacaaatgcagcaaataacttgtccttaaaccctataccctaaatccaaaccatttaacacaaaccctagccatttaaaccaacatactcctaacccataaacccacacaccttaaacactaaaccattaatctcaaccccccaaaccctaaaaacatgaacctcgacgtacattgtttccacttgtgccaagtccatcatcatatacacagataagaagcaaaacacaacaagaaaaaatcacgctgatcgtgttatcgaggaattagggacttgaatgacctcgggagtcgaataaagtcacgggttatcatttggccctgcgtttcgatctatcatatgtctagtgccatttctgacaacttcgtgaactagacaaggacaaaaacatagacacaacaccaatcactctattgactcttcactctgcattgagaagaagcaaaacacaacacattaagaaaacatgtgatcatgtctttctcccatccaacaggaacatatagtgcccttgtggccatggctcttgcgaaattaactcatgctatggcaaggactactatgccatccccatcaacctaaccaacatctacagttaatcattaaccataaaccctaacaccttgtacccatgcccactaaaaccataaaccctaaaccctaccccctgcataccccctacaaccatggactgccaatcctaaaccctatacccaaattccaaaccatttaacacaaaccctaaaccatttaaaccaccaacatacacctaacccataaacccacacaccctaaaagcaagaaccctaaaccatttatttatttttcaatccataaaccctaaatctgtaacccaagccctaaaccctaatcacaacataagccctaaaactaaaccagaatccataaaccctaggtctgtaacccaacacctaaaccctaattatacatatattgattgggcgtcattcaacacgcccaccaaccttaaaccatgcaaccagaaccttgaaatcaaccctaacccaaacctagcccaaacgtcacataccatgcccaccaaaccctaaaccattaaccgtaaaccatcgtcacatgaccatgaaacctaaccctaccccaaccctagcccaaacgtcacgtcccatgcccactaaaccctaaacccttaaccacaaactatcgtcacatgaccataccctaaacacaacctaaccatgcccagcaaaccctaatccctcaaacgtgaacataatcaccacttgaactcatgcttctcgtcactcaaaacaagtcaatttaaaaaagtcaggcaggcgtacatggtgtttggggtttagggctttgtggtgagtttaggaatcggttggggtttagggattggttggggtttagggtttggctggggtttagggtttggctatggtcttgggtttagggtttatggtttggctggggtttagggtttggctagggtcttgggtttagggtttagggtttagggattggttggggtttaggggttgggtattcggggaggggttagggttgtgttggcagtcgtacatggtgtttagggtttagggctttgtgttgagtttagggtttggttggggtttagggtttggttgggatgtagggtttggtttagggtttagggtttggctggggtttagggttgtctcggcatgcgtacatggtgtttagggttagggtttaagttgatttctttttagttactttttagatagatacttataaacgttaagtgattcattttttggtaagaatttgtgttgctaggggtttagggttgtgtgcctttggcatttgccattgttgagggggagacacttgaagcttggaattacttcctttctaacattcgcttccacattactcgcatgcaaaatagtttagtcgcatgataatgtatgcatttgtggggaccccaaacctagcccaaacgtcacataccatgcccaccaaaccctaaaccattaactgcaaaccatcgtcacatgaccatgaaagctaacactaccccaaccctggcccaaacgtcacgtcccatgcccaccaaaccctaaaacccttaaccacaaactatcatcacatgaccataccctaaacacaacctaaccatgcccagcaaaccctaatccctcaaacacgaacagaattatcacttgaactcatgtttctcgtcactcaaagaaacttcaaaaatctctgaaaaaatcaaaaaacactagaatggttggcagtttagcagagacagagaacactggaagccaagatatgaaggaactgcggagcggggggccttatttaccaaattggggcagctgtaacatgcctaattcaggcatgttacactgccccattttggtaaataattttgaaagcgccccttatcggtaaatatttattaaaaaaatactattttggttcttttgccttttttggagctttgaatttcactatatgctttagttgcacctccaccttttattcaatttgacttttgactaatgtttgtttcgctgtgcataatggaccttgtatgagtaggttgttgttgccaaggttttgatctaatttgttttagtgtttttctactagtttctttcaaatattgtaaattgtaatggatacagtacaacaaattgtaaaatcttagcctccttttggcgaaacgtagctgttggtatggatttcacttatagtgtaatgtcttacacaattgggaatcgtatgcaatacccgaatcttacttatttgaaatagttgaaacttatccttattggattattcctttaatatcttatcacttgtgttgtggagaagctgatgatgcacctaagatggttggccatgagtttttatcggggattataaacttgcttgatccttaatgcattttgatttagtgttgccataatacttgtatttcattacttaacttgtaaggttatcatgcagagtcttggattgctctttgttttcaggataatgtatcatttgtcttaagattaatccttttttggtcttttattctccgttggtggttgatctggttatgccatttgtactgtacaaattggtaaaattacacgtggacattactgtggggtcaacatacacgtgtctatttgataagtgccctaattcagttaaattcatgtttcaaatgcaggcacttatcttttgatttcaaaagatttgattataaatttgccctaaacctagttaaatagcacctagtgcttgtataaaagttgttgttcatattttggaagattaatccaatcatgctttgtattttgatagattccatggatttccgaggctttcgaataagcaaagcaagcaaggagggcttacatagcaaacatgggaggtgttacaagcaattcaggcccaaaatccgtcaaagcccaacgattatttcatgttaaaggcttttgaaaatgaatggaacacttcaaaacaaccaagagggggggtgatgtaacaccccggacgtctccggtatgttatcatcaatgatatccataacacactatcagcgttaactaagcggtgtggaagcgacagaatcatttatcttgattacattatgaatggaatataaaaccacataacaaacagcataaaacaagcccctgctgatccagataaaacataaacaacaatataggcagatacataaaaccaaacaaagaaagtcaggaggaaaaatacttatatatattctcctatctgtacatatacatgctcaaaacaagaccacaacgggtcatacaacaaatatgtatagtacaaatgggtgtacacacaccctaccattacacagagatgctaagaccggcttcaacttttgaagctttgctctggtcttctattgcagcctctcatccagcctatcaggtccactagggccttctaccctgaggtcgctcctctcctcaagaagcacctgaaaaccacaaaccctacacagggtgagacaaacgtctcagtaaactcagggttctgggaatcctccctaaccctgggtcaccaccaagcatgaacacaacatataaacaaagctgaggaaattatcctagctcacacatacaaagcctaggtcatcatcctagctttcacacatcccaatttctgggtcacaactggatgctctcagcatcagaggtattccacctcgtcatggctctcacagccatccatcagagattaaagccatcaccatggcatcagtatctcatcctggctctcatagcctatctcacagaggtactttactatcaatgtcacacaccggacactatccacacaagagaggcaccgcctctgaaccatacaaatattgcctgaggagtccctcaactcaggactttgagaatacagatatggctcatctaagaggccctaggctctagtccccctcgggaagccctctcttagagatacaacatatctgcctatcatctggcctggaaaaaccctccaggactttcataacacatgcctgggcaagaacatccatatagggcaatcacctctaggactttcacacacactggcctaggaaagaacctcctttacagggcaatcacctccaggactttcacacacactggcctgaggaggaacatccatgcagggtaatctatccttaggactttggtggagaacagtgacacctcccaaggaatctcagctattctagggagtcctcaaactctacctctggctagggaacctcaactagcctgatactcatccagtatcctctaggttccatcacagaccatctcatgatctgcattccctcaaaggcccacggcctcacacctgccatattaggtgtctcattaccctcacactgtctcattgtctatcctagggttcatcattacaacccagcacacactaggccatcacatattccaaatatccagaacggtctgagattcactcaaagcaccgttcatcagcctctcaggctcagaacacatgcacttatatatattcatatatatatatatatatcatacatcacccattcgggtggcaaactacaataaggggaaaaccccaaaacaatgagcttacctggctagttttgcctcacagctctagcctcgtctgatggtctgctcctctgacactcatgatgtccaaccctaccaaggcatacaaccacacaaatcacagaccatactagcatacgaacatacacaagctcatctagcagtcctcaactgcctctgggaaggaaccacagtcctttccctcaacctgagtcaactactctaaggttcatcaggctcatcctctacaagtctttccatagaccctcagtggtctatcacagatcatccatggcctcagagtcattccagactcaaaccaagccatcaccagtgagcatcaaagctctctcaacccaaactctcagggtttctcaggcttgaatggttcacatcaccggataccattaccatggccctctcaggcacgacaagcctatctgtaaggctctggcatgtctcatatcaagtgattcagtccaagtcacacatgccctcacctagagccaaaaccaacagtcaccaaatcacaaactgaaagctaatccttcctcctcacatcattctaagcacatctctcaattggacccagagctaattctagctctatcacagatgggtcactattcatccaaaaccccaaattcacaaatcaattggagaaactcgagtttcttacctcagaattgatgaggaaggcctctggctactctccctagccttggtgtagctgaacaccgccattcctcacctcaagctcgagttctcttcagcctttctctgagaaggaacttctctgggttttaatggataaagaggaaggattctcactctcacatggtttctagggggattaaagggttcaggaagcgtttagggtcataaggtaaggtcatgggagcttgggaagctctcccatggctgttggaggctctgaggaagaagaaaacgtttttcttctcctccaaaacgcgacccccttttaaatatagactgcaccgaccttcgcgcgggatgccgcgccatccgcgccagctgcagaaactgtggcgccatcaacgccaccctggcgctcccaacaccaacttccagaacctgtggcgttaccagcgccacacttggcgccactcgtgccagatgggaattctggcgcccctagtgccacaactggtgccccaagcgtgcccttccagagatcctggagctatcagcgccggcctagcacccttggcgccaccttccagtgggtctggcgccaccagcgccagccctggcgctatcaacgccacaccctcaacagggttttcttctgaaggatcccagcgctatcagcgcgggatatggcaccacccgcgccataatgagggtccttacaggtgaattggttgaaccttggtaaattaaaattttcaaatcagagtttttccacaagatctttatcagtttaaaatgttttgaaaccaaaaatcatttattcaatcaaattcctttgtcaagaaatcaatgagcaatacaaaactttctatgcaaacaatttgaatcaccaccaaaacaattgagagatgaagagataagaagaaagcttagccatagatttttatactggttcacttcaaacactatgaagctacatccagttcttccactcaacactagaggagagttccactattgtaaaaatattcttacaagatattacaagcctctctttatcaaccctagataaagttcagaagtctaaaacactattagacccttagagaccaaaccccaaactgaaaacactactcagcttcccttagagaaacactatttctaatcatgtaagaaaacccatttacaatagactaatctttatagaattcaaagaataaggaaagatttcacctgataatccaaagaacatatgcatgtgaaagattcaatcaggttgaaagaaagattacagactcaatgcattcatttccttaagctttgaaaaccaatgatgcttcactcttcaaatcaataacccatacgaatttgtgaagcctaaatgtattttagaaactcagaaaactcactaaagaaagcttatgaacgttcgtgattgcccagtattcgaaaaattcaataattcaaagaacagggctatgggttctatttataacagccttctaactgaaaataatcgattaaacacgctcctgtaatcgattatttcgcatatgtaatcgattaattcaagaatgtaatcgattaaaatgctcctgatatgttcagggtttgagctatgaacaatgtaatcgattattccgtggagtaatcgattaatctagacagtcatgtttttctagatacactatgtaatcgattacaaaatttggtaatcgattaagccagtcagtactctattctcaaatgtactatgtaatcgattaaaatgacatgtaatcgattaaaccagtagaacatgtttcttataggcatagatgtaatcgattacgaatttctgtaatcgattaaggcagtcagcatgatttttttttttatttaagcctatgtaatcgattaaattgatatgtaatcgattacaatgttcttgatttgttttccagaaggcacgaagaacaaaataatcgatgctatcaatgctgtaatcgattaatgcagtaaaacatcatctttccaaaaacttagctttttaaatgccttacttgttaattgcttttacttagacctttaatctaacaatcctagatgaatgattatgcatgatatgcttttggattatcagattacacaacttcccttttacatgaatcaaattgatcttcatgactttttgacattttttccaatgaggcatgttgaaagcacaaaaccatcaaagcttgatccttgttcattcatgcatggttcctcttgaatcaacagctttaactcgcccaggtgagctcccacaggctaaaatggtcacctaggcgagcacaagttccaaggagataactctaactcgcccaggcgagcaaaacatgaagaaaatggtcgcctgggcgagtaaagcaggtagcaccccaaaacctatatataggccacgaatttgagaggaaaatcatccaatttccttcattcttgcttcctttgttgttccttaggcttaggtgcttaaatattagtaagtaggtaggttaggaaagtgagagaagtgaggattcatgtggagactctgtcggagagaagtggtgatggggcccttcaacaattctttccttgaagaggttctctctactatgagtagctagcttctctgaggattggatgtaatattcttaaccctatgtatctctcttaatatttatttatgcatgaattgtttctgttccttgttggtaatttcattctgtgcttaatgcctgattctacttgatcactagtttcatgaacttaattctaagtgagactggaaagtaatcttagggttttaactgaatgatgctactcattacgttacgttgctatgaataaggcataacgttctgattgcataaagcacacgattataattcttaatgctggggtattgacttcatatgtgaggaatcgatatttggtagatatccttagaactcgaatgtgagggatcgattcggggtaaaatagcgtgcatcaataaaggataggcgatgatttatgcttggtaatattaattggatataaaaggataagaatgatgaaactcaatcccactttctcataaatatatttcattttactaagtttagtaattttatgttactttctcaaacaaatgaaattccgctcaaacctacttgtacataactattgaactgtttaattctatttgaattaattgagtaagttcaagtccctgtggagacaatcttataaattttgtaacttacaacaacaaatcggtgcgcttgttgaaaatacgtaacactatcctctgtgtctgtcctgctacagtaaccgtgtatatttccaccttaagtaccaacccggacacgacgagtacagccttgctacaggaacacgaacttagcttccagaagcacttgttggagttttttgtttaaactccatgggttatgaataagagacggttggaaaaaggttagaaaaataataaatactcccaactgctcctgggaaaggttagaaaaataataattactcccaactgcttcgataacaaacggttacgatggttcattgccaagagtcgcgatggtttactgacaactcttcaatagggttgtttgttgtctataaatagataaagagacagtcagaaaaaagtagaaaaactgatagagtttttgatagttaatcttttatgatattctcgcttagatgctagtgcattttcttatcacataactcttcactctttctgagtggttcctcaaccattagctttgttcgtttgggctgttgatttgaagtgccatcaatcttcagatgttgatccgttctatcttgggagacaattgttcatgaacctttgacatcaattggagggaacaaattgtcttaaggagacaacattgttgggctcggatcctttcatctctttgcacctgtttctgattcatacttatcatacaggttctgtttaaattggttttttgtgcatttgtagtagattatattgttcctcttgactactcagattctgacccttgtgtaatttgatatattccaattctaaattaactaatagaattaacaatcttaagacaatttgtttaaatctgggtttagtatattctatctttttgtattatatactgttgtctactctctgtacttttgaatgattaatctgtgtgattaatcattgtttctgtttgtgtaacagaaatgacttcgacaagggcaaacttggtcaacaacaacaaggctccctctatttcaactcttgctgaaaagcctgaaaaattcaatggggttgatttcaagcgttggcaacagaaaatgttgtcctatttggcaacccgatgtttggaacattttctcaaggaagatgctccgaagttgaaagaaggagacgaacatgataaagagaaggttgttgtggttgatgcatggaagcactttgatttcctatgcagaaactacatcctcaattgtaacaccccaaaatttttggaatcacagtcaaatattggggtaaaatgttaactagaaacaatacagaaggatttaagggaaatgacgaaaatacccttggacattttaaaaatgaccaaattacccctgggcattttagtaagatatatgaaagaggaaattttataaatactctgggatgtttaaaaaatgatcagaatacccttagggtgacaattacagagttttcctgaacatttttagaaataacgattttacccttagggtgaagggcaaaattatcaaaatgcccctagatcaaaactgaccaagatgtatttagaaaatttcgggaacctaagtatgggatataatacttttagacaacacattattaacatgattaggggcagaaaatcctaaacagtaatttctaggaattttggaagataatttgaaaagagcctgatctagactacttcaggtatcagaaaattgtatggagaggatagtcataatctttggagttttctcttaattatgggataaatagactaatttaataagttggatgagtaattttaataattaaaaatgaagcgaatcaataaaaaaaataggagtttgccattacatgcattaaaagaaaaacttcttcttgactcttttggatacggaggaaattataagcattatctcaaagatcccaacggtcaaaagctagacacttaagttaggaatatgcctttaaaattctaagaagatccaacggtgaaccaattcatagtgaatattttattaatacgggtttttggagaaatttggagaaaaatcaataataaggaaaagcatatagcaaaagaaaacattttggtacaagaccaagtatgctacggtgaaggaaaagcaagaaatgaaggaggagacttagtcaagcaagcaaccaataaggaacaagcaagtggaaagctaagggaatgattggagggacaaggagaataagtaataaatgtgagggaatctaagtaaaactcatccaagggaaggcaatccacggttaaagccaacaaattgaaggaattggtgtcacaaaagtgaagccaaccgtagagggataaggaccaataggagaaggaggttgaaaagtccactttcttacgattggttggtgcaaatggtagaaaagtctcccttaattctcattggcttcctacatgactttgagttagccaaagatgctaagaaggaaaaaagctacggatgactccactttaattgaagaaagcacatgaaaaaaaattggaagctagaggatttaatgcttggtgtacgaagaagcttgcttggaaggaaattattggctaaccaatcaaagactagcatatgtaaagtaatcatttatggtttatagatttttattgtgaagacacaagcttaagagtattataaaagaggagggaccggtgggcacaagaaaagaaggctacggatgatatgcctcacaaatccaagaattaagtgatcaaagctttgttctttttccaaaccttttcaaaaactaaaacaaagatagccgtgccattccaaggccctcttgttttctaaaaaccaactttctatatccttttcaaactccaccaaaattaaaatcacaacagccatctttggagaggatcacgtgggaaggtgcaagggagtttaaggccaaggtagattaaaatccaaagcaaaggtgagggaagttgtgatagattaaatctaagtatatgtgaaagttattatttgggatgttttaaggggagttaatgattaagaggtcatggaaaaataattaataaaaggattatgatagtaatcttagtagaaaataattaaattaatctaaaacaagttacatagttctaaaagataattaaaggattttgtttatattccatgaattatttttatatatgttgttatattccatacattcctatatgttgtttatattctatgaattagtatgtgtgggaaatatatgttctttaaacaagtttattttgaaatatttctttagtcttaacttatgttacttatggttgttgattaactgtggactgtataacttattaactttgttattagtaaaagatttctaatggaattaagtgaaagatttctagtaaaattgaagtaataaggactgtgtggtatcatttggacttgaaaaatgtgatggaaggatgttgagacactatgatgatattgtgatgagactgtgatgatgacactgtaatgatattttgatgatcctgtgacaatattgagaggactctgtgatgtcgagtggtgatgaaaataaaataaaaatttacaagatataaaataaatcagtgatgcattttcatgtgcatatacccggtagggtaaaatttgagatgatgagacgataaacctcgtgaagaggtgtgttagatagctagagttgaaaaagagcgttctatggtgttgaactgggggaagtggccgtggggagatcacctacccatgatgatcacatgtctagtaggtgtgagtcctgttgcaacacggacctatcttgactgatcgatccaacttgcgaggtgttaagctatctgacagtggccacaattttgagatgttgctgagatctcattcatgcatcatataataagatgagcatgcatttccttacgtgttgtgtgtggaaaatagatgatttaattcatgtgtggagtaaaatatgattaataactgctataatatattctctgtattttatctaactggttacgtatatttaatatttctgtatatatttaaattttgtttatcatgacttacccttttttgtgtcttgtggttgacacctgtaatgaccccaaattatttgggcgagcagaggaacggtgaagtgaatggtgttgtactagaagatgtagctgttgtgaatctctgtctttgatgatctatgtttggatctgtatcatggacattttatatatgagactgtggatttgtaatggactgcatgctatgtatttgtgtggatggacgttatggattatgttaggtacttacgcgtaaacttttatatttcttgaaaagctgttttaaaaacttaaccaatttaattcgggcattcattattattgttttcgaaatttaaaaaaaaaattcagtcacaattacgaaataaaagtggtcgtttcaatttcaactaaaataaatacgtaatagaagcgagtgtttcatcaatggtctagacaattccttgtataatgtgtataacactttaaaaaccagtaaggaattatgggatagtctagacaagaaatacaaaacagaagatgctggcttgaagaaattcattgttggtaaatttctggacttcaagatggaagactccaagaatgtcatgagtcaagtggaggaacttcaagtgttagtgcatgaaattcatgctgaggggatgaccctgagtgaatcatttcaggttgctgcggttattgaaaaattaccaccatcctggaaggatttcaagaactatctcaagcataagcgcaaggatatgacatttgaagatctgataataaggttgaggatagaagcagacaacaaagctgttgaaaaaaaatttggcaacaatcctatggtctctagggctaatgttgttgaagagggatcaaagtccaagaaacagaaatattccgatgttggaaatgctaaacaaggcaaaggtaaaggcaaaaagttcaaaggcaattgctacaattgcggtaatccttgccaccgtgcaaaagattgcaaaaagtcacagaaatcgaaaaagaagactactcaagccaacttggttgataccacttgtggagaaattgaaaatctcaacttaacagcggtggtgttggagtgtaaccttgtaggggacactaaagagtggtgggtggataccggtgccactaggcatgtctgttcatccaagtggatgttttccttctacacccctgtgaaaaatgatgagaaactctatatgggtaactcttctacttcaaaagttgaaggtattggaaaggtggctttaaagatgacttctggcaaggttgtgacacttaatgatgtgcttcatgtgcctgatatttacaagaacttagtgtctggatcccttttgagcaagaatggatttaaacttgtatttgtttctgataagtttgtacttactaacaatgatgtgtatgtaggaaaatgataccttagtgagggcctttttaagatgaatgtaatgactgtaaccagtggtggtgttagtattaataataatgatacttttgtttacttgcttgagtcttctaatttatggcatcaaagattaggacatgttaattttaaatcaattaaaagtttggttaatttagatttattgcctaaagttgaatgttctaatactaaatgtcaagtatgtgttgaatcaaagttttcaaaattacatttttcttctgttgatagatcaactgaattgttagatttaatacatactgatatatgtgatatgaaatattttattacttttattgatgattgcggtagatactattatgtttatttacttaatagtaaggatgaagcacttgtggcttttagacaatataaaaaaaatgaagttgaaaatcaacttaacaagaaaattaggttataaggagcgatcatgggggagaatatgatggcctcttcgagaaattctatatagaatctggggttatacatcagacgacttctccttatgcaccgcaatcaaatgggattgcagaaaggaaaaatcagacattaaaagaaatgatgaacgctatgttaatcatgtccggtttaccacagaacttgtgggaggaagccattttgacggaaaactatattattaatagagttcctcacaagaagacaaagagcataccatacgaagtatgtaaaggaaagcaaccatccttgaaatacttgaaagtgtgggggtgcttggctaaggtcgcggttcctaaacccaaaaggttgaagattggacctaaaaccgtggattgtgtattcattggttatgcacttaatagtaatgctagtcgatttttggtttataaatccaatgtctcatatatacatgttaatacgattattgaatcaagggatgctaggttctttgaggatatatttccatataaaaaggcatatgaacgaagaggcaatgacaatgataatgttgtgagacctcaagagactacaactagtgttaatcctgtagaggaagaacctagacgtggtaagaggcaaaggaccaccacatcctttggacatgattttctaacatatctgttagaaaatgagcctcagacgtataaagaatctgtaacgtccgcagaggcaccattctgggaagaggctatcaatagtgaaattgaatccatcctgtcaaatcacacttgggaattggcaaaccttcctcctagcactaagcctctaggatgtaagtgggtcttcaaaaggaagatgaaggaagatggcactattgatagataaagctaggcttgtagtcaaaggctataagtaatgcgaaggtctcgactactttgatacctattcacctgttacaaggattacatccattaggatgttagccgcactagcaacattgtatgggttagaactacatcaaatggatgttaagacaactttcttaaatggagacctagaagaagagatctatttggaacaacctgaagggttttctgttccaggacaagaacgaaaagtttgtcgcttaattaaatccctttaagggttaaagcaagctccaaaacaatggcatgcaaagtttgataaagttatgttatcgaacgcttttagtattaatgaatgtgacaagtgtgtctacattcaaaatactgataaagggtttgccatagtctatctttatgtagacgacatgctgataatgggtagtaataatcaaatgattaaagctactaagtaattgcttgccagcaaatttgacatgaaagatttgggaagagcagatgttattttgggtatcaaaattcttagaacatcaagaggtttggctctatcacaggctcactatattgttaaaattcttgaaaaattcaagagtttaaataaaactcctgtgaataattccatagactctagtcttcgaatattgaagaatactgacaaagctaaagcacaaaaggaatatgctcaagtattaagtagtcttatgtatgttatgaactgcactagagctgatattgcttatgcagtgagcatgttgagtcgttttatgagtaatccaaacgtgtatcattggaaagctatggtaagaattttaggatacctaaagcacactcaaaactttggtttgcattacgaacagtaccctgcagttattgaaggatattgtgatgcaaattggatcaccaattctaatgatactaaatccacaagcggatatgtgttcagcctgggtgggggttctgtatcttggaaatcgtccaagcagacttgcattgcaagatcaactatggaagctgaatttatcgctttagataaagccggtgaggaagcagaatggcttcgtaattttgttgaggatgttcctagtttgtcaaaaccagtaccggttgtaggcatacattgtgatagtcaagccaccattggaagggctaagaatgtcttgtataacggcaagtctagacatatacgtcatagacgtgataccattagacacctactctcgaatggaatcatttcaatagactatgtcaggtataaagagaacatagtagatccattaactaaagggattcctagagagctagttgaaaatttgtcgaaaggaatgggtttaaggcctatcaattgttgatcatcgtggttactctaccttgatgagtggagatcccacaaactaggttcaaagagacaactaagtcatgatcgactgttaaacactgtggagttttaaactcatactcattcctatgacaatacagtgtatatgagggtaagcataacgacttttaatggtttcttaatctgatgtgttcagatgatgtatgtggaggtatatcacaagaaatgacctatgtgagtgtgaagtgagggccgcttcaatgagaacttaaaaaggtcgattctctacaacacttgcagaaccaggaaggtgtccacgaccaaaatggacacaacaatgaggacgagcaatgctagggaagcaattgtgtgtctcctattgtcttggtatacaccataaaggtcgacggttcaaggcatcatgaccaccgattgacctagtatactcgataggtttacactagagaaggttcaaaggtaacccctacttatctcgatgcaattgtttctcgccgaggaatcacacttggatacatattcatatgcatttagtcatgttgaattgatctcttattcgtgtgggggattgttggagttttttgtttaaactccatgggttatgaataagaggtggttgaaaaaaggttagaaaaataataactactcctaaccactcctgggaaaggttagaaaaataataactactcccaaccactccgataacaaacggttacgatggttcatcaccaagagtcgcgatggtttaccgacaactcttcaatagggttgtttgtgtctataaatagataaagagacagtcagaaaaaagtagaaaaattgatagagtttttgatagttaatcttttctgatattctcgcttagatactagtgcattttcatatcacataactcttcactctttctgagtggttcctcaaccattagctttgttcgtttgggctgttgatttgaagtgccatcaatcttcagatgttgatccattctatcctgggaaacaattgttcatcaacctttggcatcaattggagggaataaattgtcttaaggagacaacattgttgggctcggatcctttcatctctttgcatctgtttctgattcatacttatcatacaggttctgtttgaattggttttttgtgcagttgtagtagattatattgttcctcttgactactcaaattttgacccttgtgcagttgtatatatttcaattctaaattaactaatagaattaacagctcttacactgcaacaacttatctatattcgagataatacaactaccttatctcataatatctttccagatatctataagctgttatttatctacaaataacagcatatctacaaggtacacattatctctaattcaaatataactacatgctattatatgttatcttatcaacaaattatctaataaacaaaggcccaaggcccatactccatgatataaatacaagttctctctaaaccttgatagaggttacattctaccactaatcactcagttcatactcatctcatacttatccaaggcaccctcggaaattttccacacttatatatttgattattcttcaataattaatgtacttacttgaatgtcggagtgtctttcctttgttttgcaggtccttctcttaaacaaagttgattactcactcgacgtgcaaagtttggaaagtaagaatatttggcgcccaccgtggggccgcgataaaacttaccctgcagcctcacacctaaacagatcatcaggacgcattcatggtcagcacacgctccagcatcagacgtgctactccagtagaggcgtctaaccctccacatactaccttgacgaatgccaacgcacttcagcaactccaaaaccgcatcacagagatggagcaaaggtatgaagaagaaatctgaaggttgaaggtcgatcgtgattaacacgagaccagaaggcgacaccaaccagaaggcattcaacacggaggtacaggtggtaccacctaatccctcgttgtctttcaaacaaggttcaaacccgaataaatactgccgatttcatcgcggcaatggccataatatggaagaatgttgggcccgaaaggacaaaatagaagagcatccaggcggggtatcactactacaaaaacgcttttttaagacggttgttttacccatacaaagacggttcttgaaccgtctttgtaacgagcatctttgaaaggtaagactttcaaagacggttaatgaatcgtcttcgtaggcaagaattctaagacggttgttccagaaaaccatcttagaagcctttaaaaaaaactaaaagatgaaatcgaagacggttcttctaaaaaccgtcctagaatgtctcaattctaagacggttttaaagcataacggtcttagaatgtcaccattctaagacggttttacgccaaaaccgtcttagaaataactttttttaataaaataaaataaatttaatttaagacaatttttcctatttttcgtaaaaatcgtcttagaatgtggatattctaagacggttttccttaaaatcgtcttagttaaatgttaaatttagaaaagaaataaataaatttaaactaagacggtttttccaaataactgccttagtttaatttttttaggaatagtttttcttttcaataatcaatttattattttaaaaactcttaaacattaaataaaaacaaggttatttttataaataaaaaaaggtaagttgagtacattaaacttcaattaattgagtaaaacatataaaataatgtcacatgaatattttctaaagctagcaagtaaaataatttattcggttacttgtctaagaaaaatgcatttgtttttttaaataaattaaataacaaaaaataaaatatgcatatcagacagtaagttacctttacaccatcaagtgtacatttattcttcatctcctctccaaatttgtcctttcctatgcaacctatgtaacttgtggcagagtgctatggtatggcaaagtgttatgctaagagtcgatcatgagacaaaggaataaactagacttaaactcaaccatgtacatgcactttccaaattatttctttttatgttaatagtattataaatattataagattgcattaacagagatttcttaccaagtgtgttgacgaaagtctcaacaagatgaaaaaagcaacacaagccatgccatgctttgcaataacttcacccccatatatttaaggtaatttttatctacttacttcataaaacattttataaaccttttgtggttccctgcaacatcggtttacgaaaatctggattttgcaattagtttctttcacttactagtatttgaaaccagtagcattgacaaatgatgttgccaaataagcactagccaaaagcaactcatccaaatggcctacaccaaataataataataataataataatgagaaatcaaatcagtaattcaaaattaaattgatttgcttgcttaagttgcagctccatagtatctctaaagtccccaagtccacccagaaaaataatatttagtataatatatagaattcatttgcagctccataattcatatactaatgttgatataagaatttttttttaaaaaaaaaaacaagtttatgaaaagcacaacagtgtagtcttacttaacaacatttggaacttggttcataaatgtagaaattgaagatgcattagtagaagtgtttggaccagaggggggttttccattatgttcatccttttcttctggtggagcaattttagttccattgacttgtacaggcactactacatacgggagaaacgacgacggttctagagcacaaacgacgacggttctcgaaccgtctttgttgtgggtgtcgttgtaagttggcactttcgacgacggttctaaaaaccgtctttgtaaattttttttattttttttaaaatagatacaaagacggttctcgcaaaaaccgtctttgtttgtgtactttcaaatacggtttttagaaaaccgtctttgtttctatttatttaatatttttttatttcaaaaataaatgaaaagaagacggttttctcaaaaccgtcttcgtatgccagcattcaaagacggtttttatgaaaaccgtctttgtttccctccattttgaatttatttttattttaaaagaaaggataagaagacggtttttcgaaaaccgtctttgtaggacaatattcaaagacggttttggtgaaaatcgtctttgtttcttttcatttttattttttttaattaaaaaaaaggataagaagacggttttcgtaaaaaacgtctttgtagccccccattcaaagacggtttttcgaaaaccgtctttgtttcttttcatttatatttttttttcatttaaaagaaaggataagaaggtggttttcgtaaaaccgtctttgttgcccatcattcaaagacggtttttaccaaaaccgtctttgtttccctaattttttttttctaggaatgtctacggaaattgaaattgatttgtattattactaccaaataaatttaagaaaatacaccacattgtcataatttcatgctataataaataaataaataaaaaacaaattgaagagcctggaaacactaatcaactaatgcaatcatataagaataatgaaatcatatattgcaaaaatgaatttacaaaaagtaaaagttgtataattataagtgaaacattgaggcatatacaaaaaaagtcagaacgtgtccatccttagtcaagaacaattcaattgcaaacacaccagcaccttgtagagagttaacaacattgaaagcaacttcagtgacaagctccctagtcttcaatttcgcattagctggagccttaacaatgtgacatatgttgtccctagaacaaaacataaatctttaagtagatatataaggaagatgaaatatggctaagtacatattctatttctaaagttgggacgtgtgtgaggcaaagcaccaccacatcattggaatgtgaagaaactagttgcttttagtagattccttaggcattagtacgtgtttcccgtagtatttctgtgtagtattttgacataaaatcacaacaattattagtatatatagtgaataactaggactttggttaaaagattttggaattcaaaacatgtacatataataagtgtaccttaactacattttagaaagtacaaaggcacaaggattttggattctagcctggagaaactcaaacaattaacatattctagcttagaatagtttataagttccaattacacacttggatggggaaaaaatcaaaaatattaatcttagccgttgaagcaggaagctgccacacattctctatacagttaagtagataagttggaattttaccaagattttatagcaatcacataagtttcaaatacagacactttctcacagaatcaaacagaattgtcagcctccacgttcatttccaatcacatctttcaaaatttcatagaaattctctaaaaatgaaaatggagttattccatctcacatagatccattacgatgtctatttcattctaaaaatatagggaagatctacgcataaccagtacaacacaaatttcaatgaatatagctgctgcacagaatcagaagcaaacagaacatgctgcactgtaaaattcactatgaatcacacaaaattcaaaatgttatatgatccatagtaattgcgaactagataaacagtaatacaacaatatgaaagggttcaacaagaaatcaagtatatcatacccaatggcattcgtgagaacagggaagattcaataacgcattcagcagcatattttgactttaatcctattgtttcatgttgcacaaaatagatagaagtttcttatgtcagaaggggtcatccaaggagttgtgatcattcagtcctttcaactcctgtgattctattcacacacatgacccaggccaccagaaaccattcataaagtgggttggatcgaaaggtctctaattgaactactttcttatgcaacttgccccaatttagggatttaacaaccatacacatcctaaggtttctactaggacatacagccaataactgctgggagtcaaataatactagatcaaaacattgtcttagatatgcctgtcatatctacctaatatcaccactctaaagatcacacatttgatcttaggtaattctctatcttccttctacctgtccaataactcatcactaccagacaaaaggtatttaccctcatcaaattatttagtatccactcaagccaacattgcctgagttgtctattcaaagtttacagaatttcagatacagctcctctaagagattctgggcttttacttttctaaactaacctttctcttagagatataaaacatggatctattccctggtttctccagaactttacaacaccgacctgagagtaatcaactacacagggagttctcaactctcaggatttcactcaactaggctgaaattaatcactcagaatttcaacaactcttgcctagagaggaataccaataccagtcatccctctttaggtctttaagcggagagcagtggcacctcccaaggaatctcagctattccagggagtcctcaaactcttcctctggctagggaaccttaactagcccgataccagtcaggtatcctataggttccattatcattcacctcttagtcttaatttcatactaagacacagaacactcttacggtgttcatcaataacctagaggtccaatgtcctgtacctgaaattccaggtgaccacaccctcacacactctcagtttctatcctagggttcatcacctgtttcacatacatcaaactgtctaacttttcaccatacccaaccaaaccattaatgcgtaaggtaccttagggtagatatagttagactctctaacacaatactcacattattccctctatcatacatgattctttttcatcttaaatagatataatcattacctcaaatagaggacataactcaccacaataatctcagcctaatggctatcacattccacatattagcccccataaataaacatacatcttgatgtgttgttaactttattgaaataattaactaaaaatttaaatcaatgactaaaacaattaaaacaaaaattttctgttggacatcttttgtgatttagcaaataatgcatatacaaccattcccagatttagaaatttgctgtcctcagcaacaagtgaaaagaattaacacatcatgtatgcattatttgcaaatctctaacagaaccaaacattaatccaaacagaatttatttaaaatagctaactaacaaaatagtaaaattaaaagcatactaaaaattaaaaataaaaacagtaaaaataaaacaaaataaatggtcctgttgttgtcatttttgctgctaggtgcagctgcactttccttcttgtttttctcaatctatgcaccctgaacttagaacagaacccatatatatacacctgatttaatggctgaattcccagatttggtctttgcattgtgggtcagctcaaacagaagcagcaatttagatatagttagtagatgatattcaaaataacactgcagtttcgatttttcaaatacaaccagcatgtgtacaagtatctgggaaaaatcaatatgccaagaatttcactttatacccatgattcccatatttattctattatattgggtccacaccacagctggttgttcatttacttgggtttacatttgcagtattctcaatcatttaaacataaaacccacacaggtctcagacacctgtattttaagatcaactacacaagctaaggaataaatatcaaagaataattattatctagcaaagttcactaccgtggattcccagatttgaatcctttcattggttcaatttcagaaagactgcgcatagtttacatcaagtatgtttataaacatttgggcgatcaactgctcagaattttgcagcatgcctataattcctaaatttaaacagtgagaacctctaaacatacatcaaaacaatgcagtaatatcagtcattaggtttctcattagacaatcaatattctttcaaaaacaattttcaatcttggttcagaggactatcattttacttagctctaataagatagcaacaacaagtagacaatttatactcacaataacaagcacagtccagctatccaattggtgcagtaaattcatttacaacaagagattagtttaaccaattcatagatttaggctcaaaataacaaccaatcttaaaattgtgcattagtgaatgatagttaacaattagtagcacagttattaaaaacagcagttatgtgtacaagcctttgggaatctagattgctcagaattccacaatgtctatgattcccagatttacactccagcatattacaattaaacttagaacttagaaaaaagaatcacatctttggatgtgcttagcaacaattcccagatttaagtccttgcatgtatcaaaattttagaattcaattagttcatgcaagcataacccatttgatttgatacttcattaacctctcattcccagatttagttctttcaacatgtttcaaggtatttggttcaaaaacattatcaagtcatgcctaccacaaccattttcaccatgtaattctaattaatggaagccttgtgtgtattcaaccaaccttgaccttattacaacctaaattttcatctaggcatttgatcaaacaggtggtgtgcatgaaaacaaatcaacataatgtgtgcatttggagtatgctagaacccaaaattttatcaaaagaaaacagcaaacaaccagccaattgataagtatgtattagtactcattcatatttgattctttaccctaaggtttttcagcatattcattagaattgaatgagctgaagaagaagcattgatatagtgcaagagataattagaccattagtgatttgcaacacttgtaaggtttagatgcttacctcatgtatagcttgatgaaattcaagctttgggtcctgagatttggggtaaggtgggttttggggagtgcatttgagaataggaagaattaaggtgcaaaaggacctaaatataaaaaccaagtctgcgatcccacgcgggtcgcgcggtaaccacgcgagtcgcgccatattccagatttaggcctttttggtttttattttattttgctttatgtattaaaaaatgcatgaacctaaatgcctaattctaacatgcatggaatataaatctaatgttatcaataaacagaaattaatttacatcacaagttgcttgtttaacgtcttagctagacgcatcatgctatttaattattagtggatttaaatagaataggaatgacgtttttatccacttggtatttattgtgaaatttcagaatttgttcttgtttaaagaattgatttctattatttcataaggacaaaccttttacaccaagaaagggccagaccataaatattctgacttacctggactgatgaacataggagccagaatttcctccattagttcttcctcggtcaaataattttttttttttaaacagcttctcttcttcttctttgtatggctagtctccttcgaatggttctttcatttaggatcgaactacaaatcctcagggtgaactagacctcgcataaaacttggagaagcattagtaacaaaaattccaatcaccaaaaattaaaaattactgtaaaaatccgttaaccaatcctcggcaacggcgccaaaaacttgttgtgcgattacgcgaatatatacggcaagtgcaccgatcgttaacaagtaataaagtaggtaagtgagttatcgtctccacagggattggggtaatttttacaataatattaattctaaatgattggaaaataaaacagcaaataaagagataattattgatgttggatgattggttgaataaaaacagaaattaaaataaatgcaataaaaagataaaagaatttaccaatggaagaaacaattgtggtcaggcacaatcccttttgttcctacctccttcacttgattggtttattatcttaagtcacacacatgataaatctttcctaaattcgtaaatcctagaactactagagtcataaccagcgatttaaccctttaattcgatcaagaaacctaaacccttagtgaatctgtcaaactaagtattcaaagaatatatctcatgtgatcttgttaagattattcggaggataagcctttcctaagttagttaatccctaatgtcttagtgaatcaaccctttaacctaattcaaaaacccaatttcttggtgaattctattaagttaagcatgaaaaagaacatattataaaatccgtagccatgcatccctatgtctaggcgaagaacaactatcattctaaacaggtcagaaattagaaccccaacgttcccattgtgaatcctaaccctcaatacttaaatagaatggccaattccaattaagagtaaaacattgaatagcacagagtagaataaaataatcaaaacagcattagaatcaataccaaatcaagttacagaggagttacatcagttcatggccttcccacaatacaagttcagcctgacataggcttcaagaaaccaagggatgtcaaataatacattcttggtgaccttgccttgattcttgacttccaatggtgaaaatatgagaaagagagagagaatatagaaggtgttccagactttcctggattcctggattcctggatgatttgagtcagtcctagaggcctttatttatagataaatctaattacagtaactaagcctaaaaacaaaaccaaatatgaagcatatattttaattaaggtaactaggcaactgttccttggctaatttctgtgccaaatccgaaaggaatcaatttaaaacaggcaacaaaatctactccacgcgacccgcgcgcgattccacgctagtcgcgtggactggccgaacagatggcgcttgtcgcgtgacctatggcgctttccgcatggattggcagaagagaaacaggctttactgtgaagttatgacgcgacatacgtgaattgtgacgctagccgcgcgagttgacagagaagaattcattaatcctcatagttatgacgcgacacgcgtggactcgacgcttcatacgtggtcttctcgggtcttccacgcgactcgcgtgagtaatggcgcgacacgcgtgatactcgcgcgacatgcgtgacactccagaacttgctttatttgctcttaagtccctctttttggccctgaaatgcataaatggtattgaattagatttaaaataataaaatagaaaacttaattaattctaatacatataactacttatttaacttaaattataacctaaaactatcctaaaactaagatgtgtttacaacacatcacaaagcttgagcaagaatttacaaatgccatcaaatgattgggcatgtaaaatatcaaaacttgcttccttcaatcttcttgattccaagtcttcatcttcctcagtgctaacaaattccttcctttagattaaatctcttggctaagagtcttgctttatatgtctcaatgttgcctaattagtctttcttagttttgaagactcatttacatccaatggcttttgcaccatcaggcaactgaacaagatcccagactccattcgatgccataaaattcatttcatctttcatagcatccccttaaactcatggcttatgaaaacttcagggtcattttcaactccaatattatagtcatttcctatagatacacaacaaagtcactcggtatcattgatttcattattctggtagatctccttaatgttgtttcattatcttcttaaggaacttattgttcaattggttggtcaacaatttcttcttgctcctcatgaacaacttgatctactagattatcagtaggttgtgcataggttgcacaacacccggttgagttggaagggtattgttaataacaaccaatctaagatttgaagtggatggttgagtaattgaatgatctttctcaaaaacaaaatctctggattgattgctcccactaatctagtcattctcaagaaattcaacatttcttgattccacaatccttgtactatgaaatggatagtaaaatttgtattccttagacctttcagcatatccaatgaagtactcactaatggtccttaggccaagcttcttttcttgtgggatatatattctcacttcagacgggcatccccaaacgcgtcacaaacttggtttccaactcttaaataactcaaatggtgtctttgggacaaccttagttggaactcggttcaatatgtacattgtcgtctccagcgcttcagtccacaatgacttaggaagcttagaactactaagcatacttcgcaccatgtccattaagatttgatttcttctttttgccacaccattctaatctggagacccaggcatagtgtactgggcaacaatctcatgttcttgaagaaacttcgcaaatagaccagatgtttgtccattctccatgtatctaccatagtatatcaccacctctatcggatttcacgatcttgctttccacattgtttctccacttcgaccttaaaaactttaaaggcatctaaagtttcatctttagaacgaagtaagtagagatacatatatcgtaaaaaatcgtctatgaaggtgataaagtatttcggactacttgcgtccatgtctggacaacaaatatctgtatgtatgatttctaataaagttgagctcctctttgcaaccttcttagacttgttagtttgcttacccttaatgcaatctatacaagtatcaaaattagcaaaatccaaagcactaagtaccccttcatttaccaatctcttaattctctcgataaagatgtgcttaatcttaggtaccataatatagacgaatcctcattcataacacatcgttttgtgccaacatgaacatgcataacatcataagtggtgtcattttgcaaattaatatagaaaataccatattgcaaatcaattcaccatgtgttatgattaatcatattagattcataacaaactaaagaggtaggcatacctttcttttccaagccatagcttgaacttaagacaatctttcttcatgtgccccttctttttatagaagaaacacctgaattctttcttaattccagcttgaggtggtattttaccacttcccttgttcttatgacctttcttattatccttcctctcagtcatcacaagagaactctctcattgttccaactgcaacctccactcttcctgaacacacatgatcatgagttcattaataggccatttgtctttatgtgtattgttacatattttaaaagggaccatatggtgctgggagagtattcagaataaaatgcgccagaaaggagtcaaacatgtccacctctagagttttaagttgagctgcaatgtccctcatttgcatgatgtgttcatgcacaccctataaaacgttcaaataaaatactcatatttcaataaaacaatatttcaaaaatatgagtgtcaaacaaaaccaaggcagagggaagaatgggctctgataccaaatgtaagaaaaactaaatgatctaatcacgcttatatacatcataagctattagatcaaatgcggaaaaaattaagatcataaatacctcccgtcattgctcttcttgtttgttccgaagatgaaattgcagttgtctgagtcaagtaatctataaatagtttgagttttcaaactaatctaactttttccttaagggtcttctatgctttcactatcattcattgatggtgtattgggatttttcagatagcaagcatagagaccttggccatggtgcgcatctccttttataacctcttcccatcaacgagattattttttgatatgcataaaatgtgggcatagtagctgaaaataagggataagatcaaccacaacttattcctaagaagatggggtaaatggaccaccttatgtggttttgacttagtcaagcaacagaaaagaaaccaacagaaactttgtgaaagtaagggtcaggcaaaagatatgtcttaagagatatcttgaggcgtcaaggatccttcggttcatgaaaatctaaagcttggatgttttgtggaggcaaaagaagtttttgatagttttggaacctcgcacacctgtgcaataaattataaaaaaatttgtgcacatgtgcaatgttgaaatttgaagtggctaagaactatacacccgcacgatgggaccctacacctgtgcaacgtccattgcgataatgccctgttttaaaaaaaattaaaagatgaaatcaaagacggttcttatgaaaatcgtcttagaatgtcacaattctaagacggttttaagacataaccatcttagaatggtgacattctaagacggttttcaaaagaactgtcttagaaataactttttttaaaaaaatattttttttacgaatagtttttctttataataatcaatttattattttaaaaactcttaaacattaaaaaaaacaaggttatttttatatggaagcaatgaaaataataaaaatatgattactctattaaaatccttaatcaataatttatattgaagcaatgataataataaaaatatgattactctatgtaaaatgtattcactgctcttccaatggacatcaaagcttttaccaacatatgcaactatagtcaatctcatatcattcaattggataagatttgacagagtggattggacgtaaatgttgataggttgatgtctacagaaacaagagaaaagtaaaagagaaaaacacaagcatattttgataagtttgagttattagtatggccacaaaagagatatgccaggataatttttaaaggaatttccaagccaagaggataatgccttgaagcaccaaaaaagtaatgtataaaagaagaccaaaggataaacacatagagcataatatcatcattcaaaatattacataattgataatattaagggtttcaaaaggataatcaaattcacataataaacaataaagaaaaaaaaaactataccatctttaagtggttcaatttgcctgtgcacatgaactagtgttacttcttgacaaatagtatccaaaggtcacatgatataaaacaaagatgactgctatgcccattagcatttggaagatatcaccaaacacaaaactaaacaggcaaaccttctagaatttcatgtgccagttctgacaacttatcactgcactggttcatggatagctcaaatctcaggccatctacttcccgaatgtataggtcaattgccatccatcttgacagaagtgaaacatcttttgtgacctgaagaacaaaatgaaaaccaattacacaatcagatttgaattacagggtcaaatcaaattggcaaatattcttcaagaaaatctcactcctaggtaagaaaaaaaattcttgcaatttattcataatgtttgaattacatgctacaaactttagtaattgaaacaacaaagcacatccttcaactatagtaccatcaacaccaaccacaagctttatcccacacctgatggaggcaaacatggatcaattactatcaaaaaccaatttttctttaaaagccatttttctgtccatgtctaaagaacaataacaacaatagtgatgctagctacttggatcacacaatgtcactgggttcagttaaaaaccaaattctcaggctattcatgtctaaaaaacattcaatgtaattttacatttgctaacaactacccaaaattacccacctcttttattctagcctaagacaatataaaatttgactaaaatgtacaatattggaaaagttccaagaagatttttcaaacaaatattttgcatgttaaaagctcatttatttttgtctgtagttttccaagttcaatcatcattaaacttgcactttccaaaatgaaaggcagtaatactggaaaccttcaggttgtcaataatataatgatattacaaattcaactatgctttcactactagaaaacttctgacatgttgaaaaagaatcatgtagttatttgagacaatgaaatcacatagtaaaagtacaggcaacatgaatggataattcaagatgctacctttgttgtcacatttgggtttcaatctctatcacctctcatccaagatccaaactttttggagtgcaagttaatggaagtggttttcctgtgtgctgcaaggaaggataacttgcactgaaaatcttaaagggaaagaatgtacaagttaattaacataaattaaagatgacaaacctccttctttaaagcactataactcgatgtaaataatgaggaacaactttccagagtgactgctccacaatattcaatcttgggagaattgaaaaataaataaaccaagggattcttccacttctcttttttttttaaacagtgaatcaaatcacgcatgagatgatatacaaattgtcaaggattgtctctcttaaaagattgtgttattatgtgttcatgtaggtgcctttttgggataacaaggacaaaactcttgaacacttggtcaaaaaggccatagaccattcttaaggaacaactaaaaatagaaaggaaaaatggaaaagaatccatttgattgtttggatgagtaggaaaaaaagtgaaaacaaattaaatttttttatagcaaatcaaaaaataacatttactcaatcattgtttctttattattttcttaaaatatttaatttttaacaaattaaaacaaacaaaaattcacaaatcctttcctttcatcacttttgaagagggatttactttatggtgaggccactgatttttgcaatttctccatcctatatctactctaaccaaacacaaaaaccacatgatccttttcacttcattctcatttccttccctttcaaatcaccgatcccaacaaggttatggacaatgttacatagctactagtcaattataatatcaatgaccaaagataaatgaaatatgttaagtgcagaaacaaggataaataaagtttggaacgtatttagacgtgggaaagcacatacctgtcaattttaatgttttggggagtaaagactatataggctcattagtgcaagaagttattaatcatccaaatcagttcatgcaagatgttaataacatcactcttctattgttttcaatcattgtagagtacatgataacttaatcttagttgtttatcaacaagtttgaaatcaactaatgatgacaaatgcaaacataaaaataaaatattggctaaccaagtatcagtccaaattttcttgtgacataggaagataggttacccggatgactttgtctaaggagccacaatatagcctatcatctgaagaacaaagagatgttacaacttttgtgcggtcttgagtttcttgaataactcttggtattctctttcttgcatcccatacctagtaggaagacacatagtggtattgttaagacaaacagtgagaaataggcacacaaccacattgtttctaattgttagaacactctagtttgtcagtgtaaacaagggatctataatctctatggaagaaaggctttggttttcattcttaagatgaatttagttatactgttgtttctggtgtgagctagcaaatgcaaatgaaaatgaaaaagaaggtgtgcttactcgaagtgaattatcaaagtggtctcttttgatcatatttccaagcatgacaaacattgtgagggtgaggacacctgccaccacttgtctcaaatccactcacatctcttcttacttacttccttctgcttcaatccctaaccttttaaaaaaggaagcttgagagggattcaatttcaagtttcagcaaaagataagaccaacgacagaggctggagcagcccacagtcaaaactcacttactctacaaatacatacataataaccacagtactcatcataataaataaaataaaccactatgaacaattcatttcaattgtgctcaatatcaaactttcccatttcataccacatataacatatgaatagtgttaaaagtaacagtaaaattaactaaccaggaggaagagattgcttcaatttatcggctttctcagggtcaaagacacaaagcttgtacaagtacttggagcatcgaacctcaaacttaacgacatccctgctcctcttgattttcactgacctcgcatccttcctccgcgtcgtcaaaaggaaatcctttaatctcgtggatcagcttaggttgttttgtgttgtaaacacacacacaacattattcatcagattcgagacacaatcaaacatcgtataaatcgaagacaagaaaacgaaatagtagcaattaccattgtggaattgccgatgaggagggttatgtggttgtggacgacgatgttggatatagggggagcatcaagaagactgaagcttaggacttggaagaagtattttgagctttttcacatgccatgaagattgtaactcaaaaagaagtgttaagaagccaatctgttgatcctagcattgcatgcattaaatcattcaaatacttaaatattttcatcaaaatattaaaaccaatcttttgaaaagaactaaataggcaatgttttggaaaaaatgcatatctaattgtgttaatcgattacaccacgggttaatcgattatttgcttcattttttacttggaaaagctttgaagaacaatttaatcgattatcactacttgtaatcgattaaatttgtgttaactaaaaaccctcactgctggattaatcgattaccatttctagtaatcgattacatagtgttaaaagaaaattatgcattgctgacttaatcgattaccgatttttgtaatcgattatgaagtctgtttctggatatcataacgttctgtgttaatcgattaccatgaattgtaatggattacataagtgttttaatcttttctaagctgctgctttaatcgattaccatacagattaatcaattagtttgttcatgaaacatttccagaaagctgttgaacagtttaatcgattatttggttaaattaattgattacacaggacaatttaatcgattacacctacggattaatcgattacagacagttaattctgttttttataaagcttggtgagtctttttcttataaatagacatattacgacttacacaatatatgagagattaacccataagtttctaagctttcaaaagtgtccaaaagttatgtgattctctgagttcaaacaacatcttgtgtgatcaagatttctgagtttcttagagaaaatgttttagaaaaagaaggatttcaagattgtgattctgagctattaatctttgcaacctgaaagtgtggtaacaacatttcatttcattcattcatacatgaaggatctcaagttgtgtttatcttgaacctttttttttttttatgttttaacaatttcaattgctttgtgatatatcattgtgaaccttttcaagcttgctagagtaggtttctctagtggttgagattctgagtagggttctcagtttcttggtgatttgtattctaatagggttttagaatctttatctttgtctagtgttgataaagagatcacttgtaaactgcttgtaaaatattctttgatataataataactctaacctagtgtgggttggaagcaattggatgtagcctccaaggttgtgaggtgaaccagtataaattggtgtgctctttattctaattatgttcttctctcattgcttaatttggttgatcaagaaattatcaacaagatttgttttttgactatacttgaattctaagggtaatattgattgaaagaaagattttgtacttacaaagttttaagtgataggatccatatattaaattccgcatattgttttgagtaattttttttaaaaccttgatataaaccaattcacccccctcttggtttgtttgattagcgttcattgtattttcagacgagggcgacgtagatacccgataggggttctggggcgacatcgaacttggctctggagaggttccagaagaggaaagtgttgggagggggaaggttggaggtggaaggaacacttgatgttggagaaccctagatttttaaaagctaagagcacgtattagagacatcaaaatatttaaaaaaagaaaaatatcttcatagacggtttttgaaaaaccgtctttaattgacaataattctaagacggttttgcgaaaaccgtcttagcatggtagtttctaagacgattttcgtaaaatcgtctttgaattattgtatttatttacaaaaatgccaccacgtttctttctaagtaggttttggtcaactgacgttaaaccgacgtcgttaaaacacctttatgtagtagtgtcggcgtcatctgtacgtactcacaaatactatactagattgtttaaaaaaaggaataagctatgatatcaatttttttaacaacaaacttatgtcattttattttatttagaataattaagagcatcatacaggttgaattttttttactgcaggttgaaatataattaaaaacttgatataactagggtaaaacaacatatatcaattttaattagttatggttttatgtttttttttaaaggagttatcgttttatgtttgttaattagtaaagttgttataatgtttaacacaacatgtaattaaaaaacaattacgtttacaatattacgtttacaatacatacggagatttgtgcattttaaaagtttgaattgatgttttttaagccaacttgcatgactcttaaacttttatggtagttgcgatattaatatgtttttactagctaaaattgttaactaccttgaaattcctaataatgctagctagtttctgctttattttaagggtaacgttgttacagattaacaatcacaagtggccattctaatatattttctagatctgacgcacattatatatacgtgctggatatattaattataaattttatttatattgtttatttgacttagacaaagggatgaacaactgtggttttaattttagtcatgtttttcaacatgcttagttgacaatttattaatgcacgtgatctacaaaatgttgaaatttacgataaatccaactttgaaatcaaactaataaaaataataatatagaacattaggaattacttgtacaagaaaaatcctttatatttacaccatgtatgaatattgtctcatggctgtcatctcattccgtcccgagagaaacattagcgctaccgatttcaagagtagtacatcttgtaacatttgtaacatgtattacgactgaattagaaaaataaaaaaaataaatctaagactttaggtaaaaaatcagaaaaaaattaaagtcgtaatatgtgctacgacttatgaataagaagtcatactcattcgatagtattttttaaaaatatctttaaatagtaattaattttttttttgtcccacttctttatcaaaaaacctaaattttcatcctgactttttttaaacgcaaccatgcattacgggtaatggtgatgggaaaagtcaaatggattctcaatttatctcgctgtaatacttatttttcttatttaaattaaaaagtatgatcgaatattatattataaaaagtaatcgtgtgaaattatttgaaaatattgttacaaaaaagattcttcacatcagttatatactcatatttttaagtttctaaattagttctatgtgagctgtgagataaaaatataggaagtagatataaaattgtgcatcaatttcaaaattaattttaaaagtcattttttacctaaattatatgaacattagtagaaaatcttttttaacgcgacattctagatcaattatgtatctctaaaaaacaatcaattacgtaacaattgacataaagaattatttttaaaaatagtaatatgacggcgtacaatattacactattcctgcaatcctaaatgtaatcataaatagtttttaaaattgacatattattttatatgttcggattttgagggaggagaaaagaagagggaaataataaatttaatggaaagttggtgaaaagaaagagttatgaaatatttatataaaaaaagtaataataaagatgataaatgacataattaaaatttgaggtaaaagattagaattcacatgacaaaaatattactgtacaatatcttttgtatttttggtgaatataaaatttctttttgtatataatataatttatttatatcattaacgagttgaccattaacttatttatccacaatttggtcacatgaatttgtttctacacttcgtgagctgagacttaatttaatcaattcaatcaacctaacaatcgcgttcataccatagcattggtatagccaattctgtttcccatctaatatttgatgacgtcagatattacaaagtactaatatattataaacgcatataacttcgtttgttagacaatgaaatttcacgcaaaatataaaagaacgtaatgtcaatgcgtgcgaactgcgctgttttgttattgagaaacgaagacaaatacaattaacaaatcatagttgaatacaaaaacattgataacgtgaattatttgactttctgcttgtagtagtcattaatcaatagccaatagcccaatactagaactctaaaattagcaaacactgcgtttttgggatcacggacccaaagaaaaaaatatggataaattatacttttgtcctgattttttatttacaaattttcatttttagtctctaaaacaaaaaattgatcaatcttaatctttaatggtctaacaatcattttgatcttttccgattaaataatgatgagaagttatttaattatattttttgacatattattttttgacacttaaaaatcatcataaattcttgcaccatatgtaaatgcaaactccagtgtcctcgttccttccatcgacattttcaacttaaattaatcacacaagaaatttggaaagcaatcaatgatttacaaatcacatccaacaattcaatagacaacgatttagaaatgatatagaacaactcaattcaattttttttatttataaatcccacaaaaaccaaatcaagggtcaattggtcatctcgcaatccgaactacgctgccaccttattgccacactccgtgtgacaccctactctccgaccaaaaggacttgaacctcaccggcgacactctagaaagccctatcctccatgacaccccaaaaatcaaaaaccctgttgataattgtcataaattcctatgttttggtgtaatttttggacaattagttcatacctctgtgtttttgaattttgcttatgtccatttgagtaaagttttaataaaagaacaaggtttaactaggatgtactagtttatgccagttatgcttgatatttgtttatgatcaatcttaatctttaatggtctaacaatcattttggtctttcccgataaatgttagtattaaataatgatgagatgttatttaattatattttttggcatattatttgttgacaactaaaaatcatcattaaatcttgtaccgtatctaaatgcaaactccaccatcctcacaccttccgttgacattttcaacttaaattaaccacacaagaaatttggaaagcaatcaacgatttacaaattgcatacaacaattcaatagaccgatttataaatgacatagaacaactcaatacaactttttatttataaatcccacaaaaaccaaatcaagggtcaatcggtcatctcgcaattcgaaatacgctgccaccttattgccacactcctttgtgacagcctactctccgaccaaaagaacttgaacctcaccggatatactctagaaagcctcgtcctttgcgacaccccaaaaatcaaaaaccctattgataattgccataaattcctatgttttggtgtaatttttggacaattagttgatacctcttgtgcttttgaatttgtttatgtccatttgagtaaagcttgaataaaagaacaaggtttaactaggatgtactagtttatgccttttatgcttgatcttggtttgttttcatttgttttttaggaactttgtgaaagcaagggtcaggaaaaagatggcttaagagatatcttgaggcgtcaaggatccttcgattcatgaaaatctaaagcttggatgttttgtggaggaaaaagaagtttttgatagttttggaacctctcacacccttggaagaaattatgaaggaatctgtgcacatgtgcaatgttgaaatttgaagtggctaagaactatacactcgcacaacaggatcgtgcacctatgcaacgtctattgcgagaattccctattacatttcattcttttttgtattgtgtaacaccccggacgtctccggtatgttatcattaatgatatacataacacgctaacagcgttaactaagcgcggtgcggaagcgatagaatcgtttatcttgattacattatgaatgggatataaaaaccacataagaacgaacataaaacaagcccctgctgatccagataaaacaaaaacaactatataggcagatacacaaactaaacagagatattcaggaggaaacatatttatatacatccacatgatctgtacatatacatgctcaaaaacaagaccacagctgggtcatacatcagaatatgtataggaaaatgggtatatacataccctacaactacacagagatctaagaccagcttcaactcttgaagctctgctctggtcttctactgcagcctcccatccagcctatcaggtacctcaagggcctcctgccctgaggtcgctcctctcctcaagaagcacctgaaaaccacaaaccccacacagcatgagacaaacgtctcagtaaactcagggttctggaaatcttccctgaccctggtttaccaccaagcataaacaacaacagcaaacagagctgaggagatcatcctagctcacacatacaaagtctaggacctaatcctagctttcacacgtcccatctctctgggtcataaccggatgctctcagcatcagaggtattcaacctcgtcatggctctcacagccattcctcagagatcaaagccataaccatggcatcagcatctcatcttggctctcatagcctgtctcacagacatctcacagaggtacctatcataagtgtcatcccctgaacacttctcaacacaagagaggcaccgcctctgaaccacacaaacattgcttgaggagatccctcaactcaggacttcgagaatacagatatggctcatctaagaggccctaggctctagtccccctcgggaagccctctcttagagatacaacatatatgtctatcatctggcctgggaaaaccctcaaggactttcataacacatgcctgggaaagaacctcctttacaggacaatcacctctaggactttcacaaacactggcatgaggataatcactcaggacttcccaacatctttgcctaaggaggaacatccacacagttccttctggccttaggacttaggtggagagcagtggcacctcccaaggaatctcagctattccagggagtcctcaaactctacctctggctagggaacctcaactagcctgatactcatccagtatcctttaggttccatcacagaccatctcatgatctgcattccctcaaaaggcacacggcctcacacctgccatatcaggtgtctcattaccctcacactgatccagtgtctatcctagggttcatcattacagcccagcacacactaggccgtcacatattccatatatctagaacggtctgagattcactcaaagaaccgttcatcaacctctcaggctcagaacacatgcatatatatatatatatatatatatatatatatatatactcatatatacatatcatatatcacccatcgatggcaaccagaataaggggaaaaccccagaacaatgagcttacctggctagccgtgcctcttagctctagcctccgctgatggtctgctcctctgacaccctctatgtcaagccctaccaaggcatacaagcacacatcacagaccatacaagcttcaaacatgcacaagctcatatagcagtcatccactgcatctgggaaaggaaccacagtccttcccatcaacccaggtcctctacctaaggttcatcaggctcatccatcacaagcctttccatagactctcagtggtctatcacagatcaaccatggcctcagagtcattccagactcaaccaagccatcaccaatgagcatcaaagctctctcaacctaacctctcagggtttcttgggcttgaacggttcacatcacaggacaccgttaccctggccctctcaggcgcaacaagcccatcagtaaggctctggcttgtctcatatccagtgactcaacataatttacacatgccaccacagagccaaaatccaaagttatctaaatcaaaaactgaaagctattccttcatcaattcatcgctctgaacacatctctcaacaggaccctgggctaattctagccccagctcatatgggtcactattcataaaaacccccaggatcaaaattaaacggagaaacttgagtatcttacctcagtgacgactcaaaagacctcaggacagcttcctcaagctctagcgtcctttatacgtcgtgggtcctcgccaatctcaagttctctgagtgtttcctctgagaaatcactcctcactcaaaggggtttttcaagagcagaaattgaaggattcaagctttcaaaggtttctctagggattaaaggtcatagggaggtgattaggcctagatatagggtcccaaaaagcttggaacagccattaatggaggttgaaggtccaaggaggaagaataagctaattttcccatctttttcgcttttttggccttatatagtgcccctgaccgacatgcggcgcccttggcgccaccttggcgctgatggcgccaaagtccagtgcatctggcgccactccggcgctcttggcgccaacttccagcacctgtggcactcttggcgccactctgacgctcttgacgccagttttcagcacctgtggtgctcttggcgccactctggcgctcttggcgccagtttccagcacctgtggcgctcttggcgccactctggcgctcttggcgccacatgtagaattagcctatataccccggtagtacataggcttgttggcgcggtaccttctgttcggcttaattctagactaaaacacctcatgaaggcacagaaatgagggtccttacatattgtgcttaaactccatttagccatagctttaaataggggattttctagtctagtctagggttccaaagattgaacacttgagacggagaaagagattgggatttgccaaacaacgttgtatgcaccggaagcttttctccattattcatccatcaagagttttctttttcatgattaattatgagtagctaacttctcactttcgttgggatttaattcagttgttcatactttcatgtaattgctaccttatttatattcaataaagtgttattattttgcttcttctatgtctattgcttgcttttgacttgatcaccctcttgcattattctataatgtcaattgtagttgaaaaattcttttgaattgtgaactgaaaaagacaacctatcatttttatacctagggatagagtaaaaaggattgatcatcttcaaaacatcttttcttaatgcaagtaccttgatcacactaattcaaaatattgatagtggaatcaaaggtcatagattttctcacttaagggattaaggcttaaatagttttgttggttgattgtaatataaatttaattgaataggaatttgtaatgaaagcatgttagaaagtccaatgaaattgaacccaaacaattcttctcattgattgaaacttagttaagtgtttgatacattccaaaaatgaatcgccttgctttttaatctttatttttatgaaatcttatttaatttgagttattttcgacaactttaaatcaatattttttcccttttatttgttttctttatttccctttttatttctttccttaactttattgattttatgcatattattatttagatttagttaatttaatttcaagctttttagcctatttaagttactaaaaattacctatttattgcatacgtcatagtagagacaatatatattttacttatgactttgttacttcagccattttgtactcttgaacgtctctttctatttaggaccttgacgccacgtggatcttggatcttaacaaattagcaaacctaacaactctcttttaaaaaaaaattaatgtaatagttgtttaaatgtaatagttgtgagtgattctctttcagttccttctattttttatcgatttgtcttccattcttttcgctcttcttggtccagaggggttcgtgaattccctcatctaattatcgatcaagatacaccttcctttctcatttcaacaattagctagctgctccggtcattatggagggccacgaaggtggtaagtctcgaagaggagtgggggtggacgaggacgaagaagcgaatttgaagaagggccagggaggtggtaagtctcgacgcgtggtggtggtggaggaggacgaagaagcgaatttgaagaaatggctagattttatgacaacgatgctgggttgtgtggataatgaagaagtggaagcatgtagcatttcccttgttccacggaaacttcgagaatcgaaagaggaagcttacacgccacaagtggtctccataggacccctacacaggggaattaccagcagcacggacctactatacatggaagagatcaaatggcgctgcttgctgcgtctccttctacgatcctcctatgaagatttggagcttgttttgagtagttgcggcaaagctatgttgaagatagatgaaatagttcgcgctagctacaacgttcaagttaagttgaaccgctacgagctcgcccaaatcatggtgttggatggctgtttcctgctggagcttctcatcggtggatcaccccaactaaacgtacaattaaagtgcaaatcatatacggattcttctctcgtggctcaagtcatagaaagccaaaaggtgttgttggatttgaccatgcttgaaaaccagatccccctcatcgttctctctactttgtctagaaaccttttccccgatatttttacaaaggctgatagtatcaaactgatacataagcatgcgctttctatcttgggctacagtagttctccggattccaacattatcaacttccccaagttcaaaggctttcattttcttcaacttgttcactccttcatagataatgaaaatgatgctctccggcagcaaccaaccacggaattgcgcatgcagattccggaatcatgcaatggagaagaagcggataaaggtcctcaaaaagtaaaactagagcgctgcgctacttggctcgaagcagctggggttacaattaaaccagcaaagccacagtgcaacgctaacactaggtttgacttgaaggtaacatataaacccgggaaactaagaatcccgcagctacatattaccaaaaccaccgaagcaatgtggaggaacttaattgcttgggagctgaacagtgctaccctagaaaaacagcgcgagacgaaaaaagacagaattagctgtcaattcatttcttatgcttggttctttcaaagtttgacttgttccgtccacgacgttaaacttgttggatatggctcatctttcgcagtcagatgacaacccttcttgttggcggggtcagcagaaagccaactggggtcccgctcccaggtgagcgggcgggggtccggggaagccgccccggcgggggtccggggggcagcgcccccaggcccgtagaggctaggtactgttgtgggcctctgattctttgtaatattttactttattagtagtttgggctagggcccatgaatagctactgttagggtttctttttaatcctatttatattccccttgtaaaccgagtgacttgtaacgagtggcggtgaggagattatagtacagacaagctggacgtagcctacattgggtgaaccagggtaaaatactgtgtcatatttctcttccctattctcttttctgtttttcgatttgtgtgtgattgtcgatttccaacaattggtatcaagagccttggttctgcgaccagggggtgcttgtgacagattagggtttcgcgatttagggttttttcttgggatagagaaaactgcgaaatcgatctggaaaggatgtcgactggccaatcacggatcgaggttgaaaagtttgatggaaaggggttcgagttatggaaattgaaggtggaggctttgctcgttgacagggacgtgtggtacgtgatagaagatgacaagccatcggtaccaacaaaacctgacggaaaatcagaggcaggcgagtcgaaggagttgaaggcatggatccgagatgatcgaaaggcgcgaagcgtgatctggttgtgcctagcagatagcgttctcgtgaacgtaacttctgagaagaccgcaaaggatctctggacaaagctgggaagcctctatcaaagcaagtcactcatcaacaaattgttcctgcgaaggaagctgtataatttgcgaatgagcgaaggtgattctttctctgctcatttaaattcatttaacactgtttgtgcgcaactttcgtctatagatataaatctggatgaggaagacaaagcttgcaccttgctgtgttcactgccaaactcttgggagcacataattatttcaattggtactggcgtcaataaactgtcgtttgaaacggtggttgctgccttattgtcggaggacatgagaagggcaggttctgaaggtaccagcaatgaggctctgttcgttagagggaggagtggtgacagatcaaagtctggtcaaagaggaagatcgaagggacggtcaaagtctcgtgataaatctgaagtaaagtgctggaggtgcaaacaagttggacatctgaaaaagcattgcagaaacaaaagcgtaggtcctcctgagaagcgagatgatccatcatcttctggtacaaagaaggatgatggagataacgtaggggatctgtacatggcgtttgacagttctagtgattgcaaagactggattattgacactggagcatcgttccatatgacacctcatagggagtggttctgcacctatgaatcatatactggcggtacagtcagaacgggagatgatacgactcatgcaattgtggggcgtgggaaggtaaagctgaagatgaatgacggaacagtcaagaatctgccggacgtgatgcatattccggggcttaccagaaatctgatctccgtgggaagtatggcagatgcaggtattaattttagcagtgataaatattcgtgcaagctgactcggggagctttggtgattgcaagaggagaacgtcatggtaaactgtggaaactattgggtagtacagtgttcagtggtgaaagctacataactgaacaggcggaggaggacactgctatgttatggcataggaggatggggcatattggaggaaacggtttggaaactctgacatcaaagaagttagtggatggaattccgagctgctctatggggtttggattttgcgagcattgcctgcaagggaagcaaaatcgggtatcttttgattccataggaggaagagctggggggattctagacctgatacacagcgatgtgtttggccctacacctgttgcatcacatggaaagtcaaggtattatgtttcttttactgatgatttttccagatatgtgtggatatattttttgcgcagcaaggatgaagtgttcgataaattccgcgagttcaaagccttagtggaaaatcagtttgatcgaaaaataaaggtgttgaggactgacaatggaggggagttctgttcaatgaagtttgatcagttttgtgcgagcaatgggattgcaagacagaagactacgccctactcacctcaacagaatggggtggcagagaggttgaatcgatctctcatggagaaagcacggagtatgttgagcggttcaggcttggcagctgagttttgggcggaagcagtggctactgcttgttatttgaagaatagatctcctacctcggccttgaaagaaaagactccatatgaagcactgtttgaaaagaagccaaatgtatctcatgttagagtgtttggctgtgaggcttatgcacatgtacctaaggagaaaagaagcaagcttgacagtaaatcagaaaagtgtatctttattgggtacaaggatggcgtcaaagggtacaagttgtggaatcctgatactcgaagtataacttacagcagagatgttgtgttcagggaatctaagctgaatgaaatttttccgaaagctcctgaaaagccacggattgtggagctagatgtgggtgctgcaaactcacaggttggagtgggaagctcaaattctgaagctaatggacataatatagttgaagatgaagattctgaaactgagggtgaaattgaagtaccagtgctgaggagatccacaagggaaagaagaccatctgagaggtatgcatctgaagattatattctctgtgctactgataataattgtgccctgagtattacaggtgatgatcctagtactgtaaaacaagctaggagcttggaggatgccaaacagtgggaggaagctatgaaagaagagatgaagtctctgatgaaaaatcaaacttggagtttggtgaatctacctacagaccgaaaagcaattggttgcaagtgggtgtttaagaagaaggttggtgccaatggggaaattgagcgttacaaggctcggctggttgcaaaagggtattcacagacagaaggggttgattatggagaggtgttctcacctgttgcaaaatttaattccataagacttgtcctttctgttgcagctgcatatgacctagaggtggagcaactggacgtgaagactgcgttccttcatggtgatttggaggaagttatttacatgaagcaaccagaaggttttgttgcaaaaggcaaagaggagctagtctgcaggctgaataaatctctgtatggcctgaagcagtccccaaggatgtggtacttaaagtttgatacttatgtggtgaagcttggctttgaccgttgtgatgctgatcattgtgtctatgtaaaaaggttagaaggtgaatttgttattctaactctgtatgttgacgacatgttacttgttggaaacagtttgaagatgatcagtactgtgaaagaactgctggcaaagcagtttgaaatgaaagatttaggcgctgcagatgtgatcttgggtatgcagattaaaagacagcgtgacaaaggaagattatggttgagtcagcggaagtatatagaggatgttctcaagaaattccagatgactgactgcaaacctgtattgactcccatgtccactggttctaagttatcaattgaccagtgccccaagactgaagaagaagaagaggagatggcgtcagttccttatgctagtgcagttgggagtctgatgtatgctatgatttgtactcggcctgatattgctcaagcagtgggagtattgagcaggtatatgtcaaaaccaggaaaggagcattggacagcggtaaaacgtgtgttccgttatctacgtggtacatctgaccttggattatgctatgaaagcgtgaagagctcaaagggacagacaccattagagctaaaatgctttgtggatgctgactggggaggtgatattgatagtagaagatctaccagcggttatgttgtgtcctcatttggcggagctatcagttggatgagcaaaagacaaaacacagttgctttatccagtacagaggcagagtacatggccttgacacatgctgtcaaggaggttatctggttacgtaggttgtgcaaagagcttggctttgtacaaggagaggtgaccgttgggtgtgacagccagagcgccattttcttggctaagaacccaggatttcatgcaaggactaagcatattggcatacagtaccacttcatcagagagaagattgaagacaaggttgtattgttggagaaggttgacacaaaggtcaacagtgctgattttctgaccaaggcagtaagttcagagaagtttgaatggtgcacagttgctttgggaatgaaggagcttgcgaagcattcgccaagtgggagaatgttggatatggctcatctttcgcagtcagatgacaacccttcttgttggcggggtcagcagaaagccaactggggtactgttgtgggcctctgattctttgtaatattttactttattagtagtttgggctagggcccatgaatagctactgttagggtttctttttaatcctatttatattccccttgtaaaccgagtgacttgtaacgagtggcggtgaggagattatagtacagacaagctggacgtagcctacattgggtgaaccagggtaaaatattgtgtcatatttctcttccctattctcttttctgtttttcgatttgtgtgtgattgtcgatttccaacaaaactgcttcgcgatagaaaggttataacggtagaaaaagagatgactgacaaaggcaaaaagaaaaaaataatgagcaacaaagatttaatgaatttgtttctcagtctcacagaggaatttcctgaggttgagattcaagtggattcccggtttcgtcatgtaattgagaaattgaactcatactctactccagaagatcgttccacggcaacttgttgtaaaatcatcgcacatggtgtcaggggacccagtaaaatcatgtggcattttttcagacgctttctaacatggatttggtgcacatggatagaggcatatggggttttgaaacgtgtttatatccctagcgggtggggactaatagcggtgcttgctgctgcggcggggcttgctctcactgccattcagacatattattcaatccacagctagtgttatattttactttactttaaatggttaaaaaattgttcttgtttcaatcctttgctattcttaggtgtgtactgtgtgtcgctttaactagttcctctctttcaagtttaataaatgatgtactgtttaaattattgatctgaagtgccaagtgtttttataaggcattttaatcgaaatgggtaaaaaattaagttatttaaaaaattttatttccctactggatataagtcgtgccaacttgcacgacttttgtacctgacatttgtttgacatttgtttgatagcatgtttataaattaaattattgtaatttattatattaattttattagattttaaaataattttttaattgttgttagtaattttaaatttttaatttggacagaaatattgtttgaataattttttatgtaacattagaattttttttgttatatgaaataagagatatatttatttatttgtatttatttatttattttggtaaatatcactatgttaattaatggcttgatctcgcatactaatattaaaaaaatcaatagaataattatatggacagttaaaattatattagatgagggcttgatatattaaaatcgagtaattaaatatgttgtgtaaaaagattaaccattatttaatgaagataaaaagtaaagataagtagaaactaaatacaaataacatggttatttgtcaactaaatacaaataacatggttatttgtcaacttctttgtatggacaattacgacgattatgtccttcacttctacacaatgaacatttttttggcttatttggaattggttcctccatcttgttatatttacgagtagtgactggccttcctaatattttgcgtcgttttgaatcatcaggcataaaacatggacccaaatattgaggccaattttcttcacttcaaagggaatgaaagtgatattgataaactttggaaatgttttccaacttatatacaaggtcaacaaactgattgtaatttaagttgcaagatgcacatgttgcaattgcatgcgagcatggaattcgaaaagcttggaaatatccacactcacacgaccattcattcaacttgacagtgtaactcattggtcgctgcccatgacgcgtttagcaatttcctgaacctcaaactcacctatttcccgaacgtacatgcgaacataatgagaggtagcaatgcgttgactttcttgcatcattaagtagacgtctccagagtacctgtgtcctgcctttatcatgttcaatattttcatgccattagtaacaaatgagtcatttagtgatgaggacatcaaaggtcaacccagcatcaaagaccaaccccaagaccaagatccaatacaaggcataggaggacccatgacaagagctagagctaaaaagacccaagaagctttgcaacatgtaatggctaatctgaggacaatccaattgcttgagggaacccaaaatatagagggctgcatgactggattactagtgacatgtatagcagcttggagtgataataaaagcaattattgacgtaggccttataaaaaaaataatagtaataaagtgcttgtagctgggttttgagacttggaccttaagtttagttatgcctgacttaaccactaaggcattttagttattcttacaatgttgagattttaattttattttattttctactagatgcatgagaactaaattgtataaatcaattctgaagtgaatagataaggatcttttggctgttggaattttatcattagcttgagtttttctctgctagggttcttccttgaaccatttgatcttatcaagaattcttcaattcttgtggcgatcctcaaggcttatcaaacatttgtttgtggcgcctctcagcttcttcctttgcaccattttgttccttgtctaaattttcgcattcccaattctgtgatttcaccccgaatttcttattgtcataattctcgttttacctatcctttttcggtgttttttgtgtctaaattgcatttcagaaagtcctctttcacctcgatttggaatcagtccaatccgagttctgtaggccgagaaatacatgaaagttaacaatacgattctggtcctgttggtgcgcgaattacaccctcgaattggtccgaaattgttttcaaggcaaggggattctcatcatttagtttattaaatgtttcattgactaaggcagtaataggcaatgcccgggctcctttcaaaacataattcatacattcggcatggttggtagtcatgtggccataccgtctgccttcatcatatgcctgagtccatttagacttcggaatttgttccaaccaatttactgcttgtgggaactgtgatcgcattgcaagcaactttgcctccaattgagttctccgtaactcatatcctgtggaaaaaggccataaaaaatgtcaaatatttattacagttaataatgtagaagttatttatgatgaaatggttagaatgttacccatattgatgacttgtttttttaaatcgacatttctaaattgtttgttaaaatttgaagctatgtgacgaatgcagtagacagaagatacatccgaaccatgccacccaactcgttttgatcgcaaagctgcaagcaaactggtccccctgtctgatataatacacaaatttggttgaggtgtaacatatcttcttaaataatacaagaaccacatccaagtctctttgctctcgctctcaacaattgcaaacgcaataggaaaaaagtttctactaccatcttgtgcaatggcagtcaacaaagtaccatggtatttgcccgttaagaaggttccatctacttgcataattgacttgcaatgtttgaagccttcaatgcatgggttaaaagcccaaaatacacgattaaggattacttttgaagactcatcttccctattctccattgcattggatgttttgtatttaacaattgtacctgatacaaagtgtgtaacaattgtcatccatactggaagataactatatgaatgttcccaatttccaaaagtcatttgaacaactttttgtttagctatccaagcttttttgtatgacacagtgtacccaaatctttgtagtatgtctgcaatcaaagttttgatttggatatcaggatttgttttcactaactacacaatattaatattttcttttaatgactatgtaattaatttaaatatatttttataaatatatctctttcgtgtgatgtttcacgactccctttcttattttcttttaaatttaattattcaatttttccttttttaaacaactttatttaatctttttgtttaatctttttaggcaacatatttaattaatgttatgaaattattaaatgcattttatttggttttaatatatcaactattcatcaaatataatttgagattaattaacataatgatatttaccaaaataaataaatatatacaaataaataaatatatctcttatttcatacaacaaaaaaattctactgttacataaaaaattattcaaacaatatttctatccaaatcagaaatttagaattactaacaacaattacaaaattcttttaaaactaataaaattaatataataaattacaacaatttaatttatatacataaaaaaccaaacaaatttaatatcattatttcatatattaaaataattaaatttagatatttgttacattatttaactatccagtttattatttttcaaacaatctaaattttaaattttatttttcaaattaaacttacatgttactaaaaaaatttaatttatttaccttttcaaattactgaaattataaaaaaatataaattatattaaattaaacttacaacattttttaaattatgttatattaattttacaactacttatataaaatttaattatcataattaaattcaattattatatttattaaataaattagccaaataaattaatcaaaccatatttatatttttttccaatttttttattttttcattttttttctttcgttttcttttttattgggagtagtatggagctccacgagtcgtgtgatgctccactacccccccttttttttctttttaatttaattattcattttttttatttttaaacaagtttatttaatctttgtaggcaacatatttaattaatgttatgaaattattaaatgtattttatttggttttaatatatcaactattcatctaatataattttagattaatcattataatgatattttaaaaaataaataaatatatacaaataattaaatatatctcttatttcatataaccaaaaaaagtctactattacaaaaaaaattattcaaacaatatttctatccaaattagaaatttaaaattacttatgataattaaaaaattattttaaaatctaataaaattaatataataaattacaataatttaatttatatacataaaaaaccaaacaaatttaatatcattatttcatatattataaatattaaatttatatatttattaaattattttactatgtagtttattaattttcaaacaacctaaaatttaaattttatttttcaaattaaacttacatgtgtttttaaaaaaattaaatttatttgtcttttcaaattactcaaattataaaaaaataaattatattaaattaaacaaaaacattttctaaattatatcttatattaattttacaactactagtgtaaaatttaattatcataattaactaaaattattatatttattaaataaattagccaaacaaattaatcaaacaatatttctctttttttcattttttcaatttctccattttttccattttttcttttttttctatctttttattttttattgggagtcgtatggagctccatgactttgaagtcgtgtgatgctccacgaatttcctttttatctttttaatttaattattcatttttttaactatctctctaaaattagcacataatattttaattagcacttttaccattattgcatgcagaacctaaattttatcatgcaaaacaacatactactgtttttcaaaaattcacaaaaagattctatttttggatcgacaaaattttaggattaattattgactatgaattttggttattgttatgtgtatacagtgcattatattacaggggaatgactccggccttaatctagacctttgaatattcacaaatcacaaaaatgtacgtaatccatttagccgacacagctttaattttgtttaatcaatttaagccaagtagcatgactcgcgaggatgtgtaaaataatcatcatgtcataaaatgtgaaaaaataaattatctcttggtaaaaggcaactttttagtttatttatttattatccttcaaggtgcaaaagaggttgagtaatttgcaaaagtcttgttataaaaaaaagaatctaaatttttttatggaatttacaatgttcacatgcacactctattcaactaatcaaattgattagactttcagaaatctaatataaatacccgtatgcctgccactctcatttctcacgaggaaagccgaagggctatagattgtgggagaaaaaccgatgcctcatcaatcttcaaagagggagcgatccccagatggcgtcggggacaattcatccaacaagaagcaaaagaccaaccctttcaaatatagggtcgataatactatagataccgccgccgaaacacactcgagagaaaaaaaagagaatgccgccgcccaaacacatttgagagtaagaagaaagagtgtacgggtttctggttcttctttcgcacatacatcgtcaagaaatattttagttccagggactacccccgaacccaagccaaaaaatcacaatcagaaaacgtcacccgaatccaccacatcaaccgttaattcagtgggtatgttgcaaacttcctaataatatacttgatagtataacacctcaaatcaggttctggatcaacatagactcatagatatataactttattctttaaatgacattataagttctatgcatacaccttgatttgtactttcgtttggactttgtttttctttctatccagcaaaaagaaatttcttaaacatataataatgaatgtgatcattgactcgtatgtattaaaaaatatttattaggttaaatgaactttattagatcttaacttttgacagttaccttggttcaaaacaaaatcacattctagaaatagttttggtttccaaaattgagttttaaaaacataaataaaaaagctttactttgctagttaattatatgaatttattctaggcatgaaatgaatttgtatttttcttgtgaagtgtatccttatataaattgaaaagtggtgttcatttttactatgcctgtggttctcttgtctcatcaggaaaatcaggggttagtgctggagatgtcaccgatgcaccagatcatgatccacaaactcctattcagacaactggtgactgtccattacaaacgacgccactgtccaatatgtcaagcactggtagcataccacacgttgattcacctggtatatatgctgtaaatatatttgcaaccaatttatgaccacataatcaccttctaaaatatatcaattaataaaaaatacaaaaatgttacatcaacaccccctgacatccatcgaacacggacaaaataaaatatagatttaatagaatttgcaataaagtggtgatattttgataccctgatattttacatacatcccaccaataactttaattttattttatttatcttgcaattatatcatctatggtacatacatatatatatatatatatatatatatatatatatatatatatattttagctttttctctctctctctctcattaggtgtttattagtcaacatcaacatcaacagcacctttaatccaaattaattggggtcagtggtagatgaacccaatgataaatcgaaaatagaacaaaatagagaaacaaagttaaaataaaagaatggtgagaggagaagagaaaagaattaaaacagggaacaactagaacataaaactactaaagggtttaaccctccatcagacttatagcttttctccactccgtcctaagacataccgtccgccaatctaaatctcactccattaggtcttgtttaactacctttccccatgtaagttttggtcgacctctacctctctttgtatctagctcttggtaacagactcttgttctgacaggagcatctaacggtcgtctcataacattaggtgtttattagtatttggtgtaaaaaaaaaaatctttgtgacgtgataaaaaaaagagattgaaaaaaaataagagatttgaatagaatgtttaaaataataaagtgtttgcatatcatttagtttttttttaaaaagagatacttaatctaaaggaaaatatttcatgaatatcaattatgatataagacacctagagagaaaaaaatataggtattattaaattaatgatgtgatagaaaaaagagatattaatgaaacatttaaaataaataaatatttatatatcattcctctattttaattttagtaacttgaaaaggtaacaaaaatatgcatgttgagtgtgtaggtaaaagcacgagactacaactgtttcaggcagagtcaggcgttaaaatggatctttggttgggctatggagattatgttatgtcgatccagaagaggggcattatttcaagttcaacttatgagaatagaaaggaagacgcaaatcaattgcctcaaaaccctggcatgcagtttcttccatctgagatgctttctaacatgatagagaaggccggagagcaaatgttcgctcagtacctagaatggcttcgaaatcatcatatgttaggaacgtcctccgtacccagaattgattattctcaccagtgacttccctaccttattttcttggatacaattaaagtgaataagtctggtgctttttagcgttattttattttataaaaattaattttttatctcgataattaatattaatatttatcatcggctcttattgtgttgattatcaagatacaattttaatttttattaaaaaaaataacactaaaaacactaagttgtgtcttatttttgttgtgtttttcctatttagttgacttttgtttctgttatgcactactagaaaaatcgcttttaacatcggttcttttggacatttaacatcggtttttaaccgatgttgaaacaggcgatgttgaaagtatcaatgttaacatcggttttcgaaaaccgatgttaacataatcacataacatcggttttcttcaataaccgatgtcaaataataagaaataatgaaaaaaaaattaaaatatgcatattcaacatcggtttttttgaaaaaaaccgatgttaaattatatatcgacatcggtttttctaaaaccgatgtagaaaatgatatttctacatcggttgtatcaaaaaccgatgtggaaatacatattctacatcggttttgactcagaaaccgatgttgtatattccatttcgcatcgtttgtcacataaccgatttagaatatcattttataaaaaaaaatatgacatattcacttcatttctattcttgtaattttaaaagatacattaaaagcttaaacaatcttgcctatcctatttactataactatatatatatatatatatatatatatatatatatatatatataaaaaacaggagaagagtaaagtcagacaaagaattgcagattaccatagccttggtgctaatggagccagagatagagtttaacaactgctagcacttctctaagtggttgcaaagtgcactaaggcaaactacaagttgaacacattgaacaaaaattattcttaataaaaaaaaacttgagacaataaaatgttgacactaaataaatcaatgataaacaacttactttggttcaacacatagagagtaaaatgaatatggaaatactcaaaaactggaaagaatataaatattgaataaaaacaatattggaaacaatatattaaagaaagaaaaaaaagaggatcaaataacaagataatacccactacccaatacaccttaacgttaaattcctatactattttattattataatataagtaataacaatgactacatgtttctagtaaagcatagttaacaatattataatataatataaagagcagccagagctttggagaacttctattcctgcaaactacaaattgtttatatttgcaaattagtacactagtgctttgtcactagcaccaatcaaaagttaattacctcatattctaagtgctcctggcatccaattcacaggcgctcttccatgaattgaacctattcttaaacccttcaaataccattttttaacttcctaaactttggatgagaaatgaaattgccggccagcagtataaattgattttaaaaacagtttttaaaataaaaaaaaaagtgattcaaagaggtctcaaatttctctattttaaaatggggaaactaaaagtacaaattaaacaaaaacaaaagatcaaaattgtatataagtttaaaatatattagtttagcaatttttaaaacaaaacatttccatttttgcgagagaaaaaaaaagctttaggcaactctatatttatgtgcctctatgtgtaaggtttattagattttggcctgtaactctaatagctagtgacaaattatgtgtctccatcatgtggagggtttattcggctctagcctttagttctaattgtggccaatggaaaattaaagccttcaatacagtttgttgtcatatcatgaagtagcttgaattaaatgaatgtctctttacaaaatgttcttacagtatttcctgcatcacccaccaactctgccatttgctcagaacaaatgtcttgcccacgttcaaccaacatcacaacctatttgttgctcacttcttcaagctatataacaaacttattaatattattgttatgaaatctgtcaacttataatataaagcttaaaaacattaagacaaacaataaaaggaaagacatataatagattatcactattatattaagtgaataattgaagagaaaagaagttttactataaaatcaatgtcattccatttttatcatccatgttgaagtatactcgtccttcgccatcctcttcatccattttttattcccactttttagagattatgcattaaataaaagattaagagagagagagaaaagcaacaagaaatgtacaaaactagcaccaatcaatcctagtccttcaaaaatacaaattaagcatatcattatataatcttgtagattactttacaagttcatatagtaattaatttaagtttgcgagaaaaggaaaagcataaaacttatctaaaactaaagtcatttaggcctacctcttgtattcaatagcaatgccaagcttcaatatttgtttgcccatacccttttgagccgtgcccgcaaaagctctgctgcttaacacaaaatcagtttgattattgtgattaagatcaatcaataccactctggtaccttctttgctgcatagagttgggttcttgcatcttatatgtaacatattatccattaattacatatgttaattagtcatgacaatagtaattataattaatgaaataaaatatggttgggcgtggtcctcctgatcattgtatacacacctgaaagcaggcaccacaacctgctccatctttgaagagagaagccacaccagtaaattataattagaagattcttcatcatagctaattagaggcacataaggaataataaattggatgtaattagaggcaccaaacactccatcatagctaaaagttaaacttgaaacagattcttcatgacttgtacaaaattaataataaattgcaactaacattatcttgacattgccaaatattttaacactggtgataaatggaaaaatattaatccaacaataactctagtatcatgcaaataccttaaaagcccaatccccttgaccaatcttccagagaaatcctctgtcatcatcgcccccaatagccaccaaggctgcatttgttgggttgcaggcaactgattacaactcccctaaaaaagaattcaaaaaatcaccgcaaatatttctccgatattcattcgcaaacaaaattactcacagaaattcataaacaatgtataggaaagaaaattcaagccacgaaaattgcatttgttactactgtgcccacaaagaaaagaataattaattaataatgaagaggcagcaaatgggtttgaagttcaaagcaagatgattgagaaataaaatacaaattaagttacctaagtgagagtgatttggagacaaatatcagtgcttcattatcatcgtaaacccaactgagtgtacccaaaggcacaaagcaattcgtgttcgcgctgtgcaatccccaaacccaatccctaatttacattctctccacccttaccttaattatctagcctccgacgccacgtgtctcatcacagagatcaaacccaaagccattttggtgcaagccgcggccgtcgtcgccgtttcccccttctctcagctttagtctgaagaagaacaagactccgtaaaagaaaagcgttgagagcaaaagaaaaatgcagaacaaagagagagagagagagaaagagagtacctgagctgagagagtgagagtctgatcgtgtcgtgccaccacaagatcggaaatgtcgtgatgacggcgaggaagatgagggtcacgaatggttcatgggagggagctcagagaggagaaaggcttcgagtgagtgagaaaggttacgaaattagggagctgagggtttagcgtcaactaatgtatttttaaagatccaacttaacatcggttgttttaaaaacccgatgttattggcacaaagttaacatcggtttttgaaaaaccgatgttactaaataaaacttaacatcggttttctgaaaaaccgatgttaagtttgtgtcagtaacatcggttttttgaacaaccgatgttaacttgttccaataacatcggtttttaataaaaccgatgttaacaatattcttttatttacgaaaatgccaccgcgcttaatttaacatcggttttacttgtaaccgatgttacattgtcgatgttgaatgtatattttgtagtagtgatgtttccatgaatgctagctatggcaagaaccaagaagtatcttgtttctgatcctcttctattgtatcataattactgggatagtaggttgtttgtccactccctgggtggagatcgtagatgtaggtcgttgttgtaataaatatggtgtgttgtaccaaaaacacagatgcttctctttgttactttgaatacattgaaataaattaaactggggtttagttcaattatttctggtttcatactctatagtgtatatccagtagctattgctcatgaaacaataggaagtctgatcagcaaagaattcttcagctcgtgaataagaacgagagaaattacactactagaaaaatgacatttaacattgatttttttggacattcaacatcgatttttaactgatgttgaaattatcgacgttgaaagtttagatgttaacatcgattttaaaaaactaatgttaacaaaaatatacaacatcggttttttgtaaaaatcgatgtcgttatataagaaataaaagaaaaaaaatgtaaaatatgataatttaacatgatgttaacttattttacaacatcgatttataatgaaaatcgatgttgttgtgatgtaacaacatcaattttcagataaaattgatgtccctgtatatgtaacaacattggttttgactgaaaaccaatgttgttacgttacagcaacatcggtttcatattctaaaatgaagggtgtaaacagtagcagttattttgttcaaaatgggcaaggcccaaatggaagggggtgtaggtgttagaaagaaggttgtgaggagtaacatttagtttgttcaaaatgggctagacccaaaggtaaggggtgtaggtgtgaaaacgaggggtctaaatagtataaatagttttttttttttttgcaagggttggaaggttagagcaactcgacccaacccacaagtagcaatagggttggataacccttggtgccattgtagccaaacgtcacggagaaggcaggaagcatcactgtggagaaggcaggctccctgacgccactggcgcaggggccttgagatgcgaggccaccacgaggggtgacgatggcagtggcggcgtggtggcggcatgatggcgacgtggtggtggcatgatggtggcgcggtggtggcaaaaacaaaaaaaaaaaagaagagaagagagggaaggaagaaaggaactttgcaccatctcgagccaccatgacaaggtcagaggtggctctcaaggctctcgccgacggccaaggtgctcgtcgacaagatgaaacgaaaagaaacagaccaaaaaaatgaaaaaaaatgaaaaagaagagaggtaaaaggaagagagaagggagagagaggaagagaggaaattgagagaataggcctgagagacccctcttcctcctttggccgcgctgccaaatggcagtgcttgactggtctgttttctttttcaaggattcgagcctcgtttgtgcaattaatcttcggtatccgtgcctcctttgtgtgtgtgtgtatgtgtcttttttatagtcatcccatcgtgactagccacattgcaatagatagcgactccactagggactggtaagagagttaagccatttgatctagtgtgcaaatttatcttgactttttctttattttttttccatttttttctttttggtttgctcccgtttgttgttgtttcagttcttttcgtggttttgctgcgatctcattttttattctgtctcgctcatgcttgtatatatcctttactacgttgtcactcctttgtagttagaaataaatggagatattgaattctagggtggatgacatgtgctatacttgttgtatctgccttggaatgttttggttgttttgcaggtgcggttgcataattattaggttgctccattcacacacgacaccctatactttttacacacactttgagatattgggccctatactcgagtctatgtgagccatagggagtggaggtcgatatgtggtcatgctgggtctctgactcgcttgatagcagtgaaacctcatctagaattttcctatttttgtgacgcattgcgactggtagtccctatcgttgtaatgttgtcacttaagaggatgatatctcgagatcggtgaggttacatgaaactacccatggaagttgtcactggatagtggactttcagaccctttctgctaagttcctgaattagggacatggagcatccttaccccaccttgttttcttgatcgcatcatgcatttcttcatagcatcgtgatgggcatatcattttcaccttcatcatttatcatattcatgcactgcattcgcataagtcattgctttttcatacaaattcgtttagcatgtttcttgttctagcaatcacatacattctgccatcatcattccatgccatgtttgcccatgcattatcctctgtgttgccaaaagttgcaatgaagcgcaaaagcttacatcgtgttcttggttacgtgcattgggtatcatgaccatgtccataaacaaaccatgttgggattatacactcattttcctgaaaatgatcgaaaatcacatgaacatggtacctaacatgtttgaaagcaataaggggtggtctttcaggcgtcttgcgtagatctcataaatacatctgccacgcataacataagtatgtcctgctcattcatcatatctcctctaggataggttgtcgaagtattgacgatcaaaatttccattccttggaacataaggtcgaaccaagtgcaatcttttaagaaaaggttttataaagtccaggtcaaaagtctggaagtagctagcttgcaaaagtaagggtagcagatggatcaggttttcgtagcttctttgactactgccaacacatgatggagctaattacttacataattaggaacccctgatgtgccggcgttttatttccagttgtactttgaccttgataagatgtaatgaaaaatgttgttttaatgaaaattagagttgattcgaccctatgttctagtgagcattctgtgtaaaattcacaatacttcagcaagttatcatttacatgcaatcatgcttatttgttttgtcgcgttgttacgcattgctctttccttgaaatcataaaaaagtaaccattgtgctaaaaaagaaagattgtgctttatgacacccataccagacacgtgccaagactaatataatgagtggcatagaacaagtacaagggcaaatgaaggctgatatggaggctatgaaggatcaaatgacaacaatgatggaagagatgatgagcatgaggaagatgatggaggtcaatgctaccattgttgttgatttcggtactgttattgaaaaggacccaattcacccgtgaggttccaatcaagagagtcatccaatctcaggagtagttggtcagggaggcgaggcggcaataaacacatatgggccttattatgtctcagtccaaagcaagtcttcttttccaccatatggtttgcctcccaattatacaccgccattgttgtatatgctcttggtgagaaaatttgtagttctgcacccgtattcattaagaatcaacaacaccaacccgatcatactcatgcccatattccttaagtcatggaggaaacacatgcagctcccccaagaccatactctatccggtttcggggtttatctgggatatactagtgaagggcatgtattttctagtgtccccatgccaaatgctcttagggctccttagtatcgatcaccattacaacccttacgttttgtaatgggagaaaggcctcctgttgtagttaaaaaggaaaaaattgatcatatagaggaaaggctgagggccattgaaggaggaggaaattatgactttgttgacatgtcagaattgtgcttggtacttgatgtggtcattccttcgaagttcaaggttccagactttgataaatacaaggggatcgcttgcctgaagaaccacctaaagatatattgtaggaagattggggcatatgcgaaagatgaaaagctgctgatgcatttctttcaagaaagcttgactggggcaactattttttggtatactaacttgaaatcctcttgggtccgctccttgaaggatctaatggatgccttcattaggaagtatcaatacaattcttacatggctccagatagaatgcaactatagaacatgtgcaagaaagataatgaatcattcaaagaataagctcaaaagtggagaaacctggcggctcaagtagtacccccatggcagagagagagatgataaccatgataatggacacattaccagtgttatattatgagaagatggtaggttacatgccttcaagttttccagatctagtgtttgctggtgagagaattgaagtaggtcagaggaaaggaaaattcaatcatgttgcttctacgaaccctagtaacaggggactcaggatgagtggcaagaggaaaaaggaaggagaagctcatgttgtcgctactgttcccacatggccaaactttccacaagccctttataatccctgtaacatcccgggcgctgacgagggcggggaatgatcgccaatgcagtgaggcacggacaaggagcgactcttggcaggcctccagcgggaggggtacatgaatgaatcaaatacacacccgaacgagagggatccagaggctgtacaggtatgggactgtatagttgaggataacttaaaggatttaataggtactacctataccaacaaggtgcatctacttttcggtagtccataacataagaactccacagttaagcgtgcttgacttggagcaatcttgggatgggtgacctcctgggaagtttctcaggaagtgtgtgagtgaggacaaagcacactaaaaagtcttgtgttggtatgtagggacaatcgttgatcttgcaagtggctgggcgttacaagtggtatcagagcaaggtgatgtgttgcaaacacatcatagttttaggctaaatttaggttataatttaattaaatagttaataaaatagaatagaataggttagtttattgtttatagttaatttaatctcatttcattaccattgttgcttttcagggccaaaaagaggagattcaagcaaagaaagaagaaaacaaggttcaaggtctcgcgatccgcgccagaggttaaaatacaaggtccagattcgaagactccatgctatcagcgtggaggttttcgctagtagcgtgaccaagccgcaagcctcgcgccactcgcgccacaagcccaggatcaacccttccttgtgcagacttcacgcgatcaacgtggagtttcatgctatcaacgccatccattcgaaaggcccgcgtgatcagcgtaggaccccgcgccatcagcgccatgaagatttgctttcctgatttaaagttatctgtttcaaaaattggcacagttttaggctttgttactccaattaaaccaatctataaaagaaggcctctgggactgaatttacacacactttcacatcatacttcatcattctaaacctttggaaatcaagaatcaaggctagggttgcagcaaaatcatgtattattcaacagcttttgtgttcttgaagcttatggcaggctaaattctatattgtggttaggccaagaaccgatgtgaaaatcaatttgttcattacctagggatggggatgcgtggctgcagaactttataataaattctttcaattgcttaactcgatagaattcactaagagtgtgtttggataaagaattttaattggggaaagtaatttattaggggatttaaaattcttcaatttaaaattcactatttggatatttttatatgagaaatttaaatttttggaattttaaaacataattttaaacaactaaaaatgtggaatttgaatttccctctaaaaggtgagaaattgaaattctcttcttttttagaagctctaaatgcacaactttttactgcgtctcaatcaccgacgtacttcgacctctgctactctcacgacaccacccaccttacgtgtttttccgtgaatgaggttcaaaattttaaaaatgaagaaattcaatttctttatccaaacacaaaattttgaaaataaaagaattttaattgatgcattttaatttccttgaattttaaatttcctgaatttttaaaatactccatccaaacatagcctaagggattaggtttttgattcaggttaaagggttaattcactaagggattagggattaactaaactaggaaagatttattctctgagtaaatagaagtaatcaaacttgataaccggttaagtgaaagaggtagggatcaaagggaattgtgctggaccacaatcattcattctattggtaacaacttcactcaattttactgcatttatttctgtttttattcaacattcaacaacacaacaaacaacttcttcacaaataatttctttttacttccaatcacttagacctaatattactgtgaatttcacaccaatccctgtggtgacgatactctacttacccactttattacttgtaacgagcggtgcacttgccgttattgcaacaagtttttggcgccgttgccgggaattggtaaactgatttttacagtaatttttaatctgtgattggaatttttgttactaatcacttctctaagttttatgcgaggttcagttaaccctgaggatttacagttcgatcctgaaattgaaagaactatccgaaggagactagccagacaaagaaggagaaaagctaaaaattttgactttgattcaatccctgaattagagtctgaagcagagatggctgaagaacaacataatcagccaagaccaagaccagaggatgaactaatggaggacattctggctcccatgttcacaagacccaactccagcattgtgaggccgccaatccaagctaatcattttgacataaacccttcattaatagcattggtggaacgcagtcagtttggtggggaagactttgaagacccacatgacttcattgacagatttctcagaatctgtgacactatcagacaccaaggggtcttagatgatgcagtaagactaagcttgtttccttttgctgttaagggaaatgccttgagatagctgaacagacaatcatcaaatagcatctcgacttgggaagacttagtctctagattttttgcacagtacttttccatggacaaatacaacaggttggtgaacgaaatcactaacttcactcaaaatggaagagagtccatgtgtgttgcttggaatagattccaagaattgatcaggagatgcccacaatatgacatgcctgtgggtaagcaggtacgtattttctttaatggtatgactcctgaaacccgtatgattgttaatgttgcagcagggggtactataaggtacaaaactgcagctcaaacatatgagctcattaattctctggcccaaaatgaaaatgagagtataaccattcagccgaagagagaaccaatttagctgtccagcaatgatgctatgcttgcagagcagaaaatcttggcccaacagctggccaagttgactgagaaaattgacagacttcaagtctctgcagcccaagttgcatccagccaaccacatgtgatctgtgaatacttccaaggtgagcatgaatctaatgtttgtcctattcttgttggagctgaccctgtgcaggttaatggtatttggaatgatcagagacagcagcagccatatcaaagtaatcataacttttgctctgggaaataactatcagaggaaatttcaaggaggaggattagactataagtctaataattatttgctgccccctcccattcccaacaaagacatttctgaattagaaaaggtagtgttgcagctgtccaagacaacaactgaacatattcaggcaaccaacgcctttatagctgaaataagagctcacagaaccaaccaagacgcttccatcagaaatctggaaaactagattggtcagcttgcaaaacagttggctgagagaccaccaggccagttcccaagtgacacagtgataaacccaagggaacatgccaaggctattacaaccagaagtggtaaggtccttacaccaccagaaaagcctcaggtgagtagaagggaagctgaaaagaaaactgcagcagctgatgcagatgaagagacagctgcagaaaattctaaagattagaaagttgcacctccacagaagaaatgggatttctctcgctttgagaaacccccatatccggtgcaaaccaaacaacagttgcagaaacagcagtttgccaggtttttagacatgttcaaaaagttacacattaacataccatttgcagaggcattagccaatatgctaactatgcaaaattcatgaaagaacttttatctaagaaacacaaactgcaggattgtgaaaccatagcactcactgaggattgcagtgcaataattcagaggaagcttccacctaaattgaaagaccctggaagttttaatatccctatagccattggaaatataaatgtaggggagcactctgtgatttaggggctagtataaacttaatgtcattgtcaatgtgtaagtccctaggcatatctgaattgaaacctactagagtttccttgcaattagcagacagttctttaaggaaaccatcaggagtaattgaggatgtgctagtaaaggtagacaaatttatattgcctgtcaactttattgtgttagacatggagggtaaaagtgaaatccctctgctgttaggaaggtctttcttagccactgctagggccttaatagatgtagagcagggaaagcttgagttaagaatggataatgaatctgttgtctttaatgtatttaatgctatgaagcatccagctgatgaacatgattgttttaggctggatgtactggataatgttatcggtgtaggcatgacaacaagtttagcagcagttggagatgaagaaaatactgcagcagaaattacaacagcaacaaaacatgcagaaccaacagcagcagattatgcaacaaataatacagcagaaaattatgcagcaaagcagcagaaacaggcaatatttcaacagcagaatttgctgcagaattaagtactgcagatcaaaaagctacacctgaacctatgctggaagagctggagaaaaaggaagatgatattccagttggagcaccgaaagttgagctgaaagaattgcctgaacacctgaaatatgtgttcctaggtgagaatgaaacatattcagtcataatcaacagagggttggaatggcatgaagaagagaagctgttaaaggtactcaaggagcacaagacagccattggttggtctatttctgaccttaaaggtatcaatccctccttctgtactcataaaattctcatggaaaatgatgtgaaaccagtaaggcagccacaaaggcgactaaatcccacaatgaaagaagtggtaagaaaagaggttgtcaagctattagatgcaggtatgatatatccgatttcagacccagcttgggtaagtccagtccaaaccgttccaaagaaagggggcatgacggtcatccaaaatgacaacaatgacttgatcccctcaagaacaatcacaggctggagaatgtgagtggattatcggaggcttaatgatgcaaccaggaaggatcactttcctcttcctttcatggaccaaatgcttgagaggtttgctggtcatgactattattgttttcttgatggatactctgggtataatcaaatcccagtagcaccagaagaccaagagaagacagcctttacatgtccatttggggtgtttcataccgccgaatgccatttggattgtgtaatgcgcctgcaaccttccagagatgcatgttatctatcttttatgacatggtagagagaggccttgaggtatttatggatgacttttctatttttggcccttgctttacttcatgcttagctaacttagctaaagttttaaaaagatgtcaagagacaaacttagtcttaaactgggaaaaatgccacttcatggtaagagaaggtatagtgctaggccataaaatttctgaaatgggaattgaggtagatagagctaaattgttactaattgagaaattaccccctcctattaatgtgaatgatgtttgcagctttttaggccatgcaggtttttacaggcgtttcatcaaggatttctgcaagatttcaaagccactgagttaattgctggagaaagacactgagttctgttttaatgatgcttgtcttgaagcatttaacactttgaagcacaaactcaccactgcaccggttttgatagctccagattggagtttaccctttgaactcatgtgtgatgctagtgcttatgcagtaggtgcagttttaggacagagaaaggaaaagtgcttacatgttatatactatgctagtaaaattgtaaatgaggcacaagttaattatgccaccacagaaaaagagctgctagctgtagtatatgctttagataagttcaggtcatatttagtaggttccaaagtggttgtgtatactgaccatgcagctctaaaatttctgctgcacaagcaagatgcaaaatcacgcttgctgcgttggatgcttttattgcaggaatttgatctggaaatcagagataaagctggagtagagaacaaagttgctgaccacttgtctaggattcaagagaaagacttgcaagatggaccagagattgaaatcaatgagtctttccctgatgagcaagtgcttgctatgcaattcagtccatggtttgctaacatggccaactttaaagctgctggaattatgcctgaagaccttaattggcaacagaagaagaagtttttacatgatgcaagaaggtacttctgggataacccttacttatactttcaatgcactgacaatgttatctgcagatgtgtagctgaaaccgacgtgccggatattctgtggcactgtcattcctctaactatggaggtcattttggagcaaatacgactgcacacaaagtgctgcaatgtggctattattggccaacactcttcaaggattccaagaactttgtgatgcagtgtgataactgtcaaaggacaggtaacatatgtcgcagagatgagatgccgctaatatccaagaggtggaactgtttgatgtgtggggaatagattttatgggacctttccctaaatcattctccaatcaatacatcttggttgctgtggactacgtgtccaagtgggttgaagcagcagctttgcccaccaatgatgcaaaggtggtggtttcattcttgaggaagaaaattttcaccagatttggggtgccaagagcaatcataagcgatggagggactcatttttgtaacaagcagtttgacagcttgttggccaagtatggagtcaaacacaaagtggcaaccccttatcaccctcaaacaagtggccaggtagagatttccaatagagaattgaaaagaatccttgagaaaactgttggaacatcaagaaaggactggtctaagaaattaggcgatgcgctgtgggcttaccggacagcatttaacactccaataggtatgtcccattttcagcttgtctatggtaagacttgccatctccctattgaacttgaacataaagcaatgtgggcaaccaaaattttaaactttgaactgtcaaaatctaatgaaaagaggttgcttcagttgaatgaattagatgagttcaggttagctgcgtatgagaatgccagaatctacaaagaaaaggcaaagaagtggcatgacaaccgaatccgcccaaaggaattcgttcctggccaacaagtgttgctatacaattctcgcctgcgactctttccaggtaagctaaggtcacgatggtctagaccattccttgtgcgaaaagtttatccatatggaaaagtagaaatttcacccttggatagtgacagaactttcaaggtaaatggctatcgattgaagcattattttgggggagatgtggacaggaattctgtttctgttccactcaaggccactgatgagtaaaaaggaaataaacgtctcgcttaagacgttaaacgagcatacttctaatgtacatacatggtattctaagttctgttttaaattttatagcagtagatttattactctgcatattcaatggtagtcactttaggttcatgcattagtaattaagcatttaaattctttcaaatattgatagccttaggttaattaacatgcatgtttaaaattttagtcaatttaggttttatttaaagataataaaataaaataaaaatagaaagaagcaaaaagatgtcaaaagaacttggcgctaaccgcgccaagtacgacgacgctcaccgcgccatagatacagctaaatcacgctattggcgtgacatctcgcgctaatcgcgcgagatgctcgaacctgagccccaattctgcattaaatcacacaagtagcgtgaataatggcgctggtagcgccacttgttcaagccaaagcctccaatataaaggttccacgctactagcgtggatatggatgctaatagcgtcaagaattcgaggccgtggtcctttgggaacaaaatcacgcgattagcgccgaaggtggcgctatcagcgtgaacatagcgcaattaatggcctgaattttcccattcacgctactcgcgcggtattccgcgctaaccgcacgaactgggcgcaacagaagcctctccagtgtttaatggcgcgattcgcgccgtgttccgcgcaaaccgtgcggcatcgcgaaaactgcttttattttaaaacttccctcattcgcgcctcactccatccttccccaaaacttcgccctcattctcgccagaaccccagcctccattcaccatcatcaccccaccttcaaacctttaaaagccatacctacactctctctcaccctcattctgtctcactctcgcattctgtcactctcattccctctcgatttcatttcgctctgcacctagggaatccagttctgcaatggcgggagaaaaggtaatgttctggaacttaaaatgctttgtatggtataaaggtatgtccatcagtcattggaagacccaatgcttgttgccctagggtccctcccataagttctgatatgctacataatcaaaccttagggtaggcaatcatgtacttgtgtccactgcgaactctttattgatttttgttcttagtacttgtggcaatgaattgggtgtgattgttgaatactaggataatgggtttcttggaccttgattgtgttgcatccttgaaccacacacttgttatcattgattgttgcaaatgcttataaagtgcttgataaattgtctgtgtggtatctaaactctgtgtgggtagcatttcattgatttttcatgattgactcacaacgaaggttaattaggcatggggatgaatactgttgattgaactgaaccccaatgatgtgttaaacactttcaatgttggttagattaggtacatggagtgataatggttgtattatatgtgttttgtgcctcaaatatgtgtgcctcatattttggatgaaccaaacttgagtcattagtgattgctgtatgatgtgctcgcaatgtaaataattgagtaatttgaaacttaagaattcagagcacaattgacaatcaattatagggtccacctcaactgttaaaacatacatcagaccctgagtataggaagcaattctgattttgttgattgatgaatgtgttcccaaattgttttattgagtcaaaacagatggtaagttgcctgtgctggtaattgctgatacgaatgatctatgaaacgatcacttctacttcgtttttttattacgtatttatttttatttgctaaaaaattttcaaaaacagaaagaataaaatttcaacaaatcttggttgatttcaaaaactagatttagaaattataatagtttacgcgttatttcagttatgtcgcgcataacgttcacacataccctacagtccattcattattacatacccagagtcccatatatacacagtccatagtacagtacaaatacagatcatcaaaaagcagaaaaacaacacacaatcttcattcttctcgtacgtcatccaaatcactgcttttctgctcgcccaaataatttggggtcatcacaggtgtcaaccacacgacacaaaatagggtcagtcttgataaacaaaatttaaatatcaacactacggaataataaatatataaataataatacagagattttaaataaaacgttttccttaaagtttaataatctttaacccacgaattaaatcatcttttcttcacacaaacacttgtcatgatatgcaagaaaatgcatgctcatcttattatatgatgcatgactgagatctcagcaacatctaaaagttgtggccactgtcagataaccccaccctcaccttagtggaacgaacctatccatcccgtcagggtagcccagtgtcgtgcaggagcctcactcccatccatgtgatcatcatggtggtgtggttccccactgtctcaactacccccaagttaaaacacgtatggaactcagttagttatctgacacaaacacctctttcgatgatcacctctttacacctctttcgaggatcgtcccatgcacatgaaaatgtatgaatgattcatttttcatttttttaaatcttcttttattcctcatcattttcatctcaaattcacatcatcacatgatacacttttcattttcatcatcttgaatcatgtatggatactcttttcatctctttttcttaaatcatcatcatcacatgattctcaaatcaacatcatcacataattctcaaatcaacatcatcacatgatcaccccttaaatcacatctcatcatcttaatttgttcaacatcacatataattttatggatttgtgccatacttataaattattttcccagtcacataaaataaccagtatgaatatgcttgctgttcgtcatcccaacatatattaccatcacttcacataatacagcttatattcacaagtgtcgtataatttaattacagcaacagcattcataccgcataaattaattacgtcaattagcttactacttcccttaacagcatacagatccatttatcaacaacgtacagatttacttaacaacgacatatagattcattttttaacagcgtacagcatacagatttatccaatatacagatttaataatttatagcatacagacttattatttaacaacttacagcttatacaattaaatttccatacagattttaattatttttcagcaactagcaacaacagcataccgttttatttttcagcaactaacaccaattttccgttaacgttatttgatcacagaatttccccaaatccaattaaatttagctacagaagttatttaaatttaaaatacagacaagaaataaaatatacaacaactacctttatgaaacatagcttaaaatcctagaatttttagaggtttaaattatcataatcaactaccttattcatggaacgaattaaataatgaaacataaaatgctttcatccatgattcgtactgcaataaactaattaatcacaagaataaataaacaacaagatacataattaaacaaatttataaacaacatatcgtctaattaaatgaataggtgaaattaaagaaccattagcaaataaactcattctacaatcatctataaccaaactagttttcaaaacacaattccaaattattaaacatcaactagaaagttaaattaaaattagtttaaacttatcttctccatttcttttcaattcaccaaattaaatttctactaaattaagtagtaatcttaagtagtgtttaatatataaactttaattcatcaaaacttccctatacctcaattgtttcctccaattgaacaagcttgtctcctagcttcacgtgaacttgccttagattggaaatattttcttcggtgaaagtgatggctcaaggcaagaggtacacggttaaggcttgtattttgagttctataaagctaaaaaccaaaacaaatagtagggacttatggctgcacggtgggttccttgtagttagattcaagaaaacaaaaacaaaaggcaagggaaagtagtatttaagggctgcacggattggtttagttgatgagggcttggattcaaagattcaacaatacaaaaagcaaaacaaaagcaagtgggacaagtttagggctgcacgttgagttccttggctgacccaaaattctctccttgcttcccttttataggtccacttcattcccttcttctatcaaagttttgcacgaccaaatgaggataagcttcactagatttttctactagcatttatgagggaatcttagcattaatggcattattccctttgtctccaagcttgcttatcctttctttgcttttgacttggtcctccctcatttccttcgtgaaattcactcattcaaggcccttataatttgctttcaccgtagcaagcttggttgccccatattgccttttgtttattttttcttcaaaatccgtattaataaaatgctcactccgaattcattcaccgttggatcgtcttagaattttaaaggcatattcctaacttacatacctagcttttgaccgttgggatctttgaaataaggtctctagctgtctacgtattttaccaaagaagacaacataagatttttctttaattatcttttacgcattaattactttcttattggtctgttccacttttaattattaaaattactaatttaacttaataaattagtctatttatctcataattaggagaaaactccaaagagtatgactatcccttccatataattttctgatatctgaagtagtctaaattaggcactttttcaaattaacttccaaaattcctaaaaattattgtttagggttttctaaccccaatcatgttaataatgtgttgtctaaaagcaccttatccaatactaaggttcccacaaatttctaaagtcgtttggtcagtgtttgtcctaaagggtattttggtaatttcaccacgtaccctagggcaaaatcgtcattttctaaaaatattcaaggaacctctgtatgtatcaccctaaggatattctaatcattttccaactatccaagagtatttataaaattttctccttcaaatatcttgctaaaatgcctaggggcaatttggtcattttcaaaatatctaggggtattttcgtccttttctttaaattcttctgtattatctctagttaatatcttaccccaataattgactgtaattccaaagttttggggtgttacaatctagcttggtaatcttattgttgtgaaatgaatgaatttagtttttggattgttgcataagcagctaagtgtgttttgcttgggatatggacagaacctaaaatctgggaatccaggttaagctattcattcatctgtcataatgtgcatattatttaccggtccaaatgatactttgaagtggtgtgtgaataaaatgagtgaaattgtggtgtatgtaaggcacttcaatctgggaatgcaaggttcgctttttttttaaaattaagataattattgaactaactggttgggtgaattgtgcttgtattgttaccataattgatccagttgctgctgtataattttgttggtgttgggacctgttggaaaatgatattggtgcagcgattgaattttgttctgaattgatgctactgcattgtcttagtgttgtgtttgggatgctaaatgttttaaatctgggaatcctaattgatgatcactgttgaattgttaattgtttatggcacctgtggcttttcatgtgcatataagtacaattgcaagtacctgacctgatcactgattttctaaatcccacagtttcagtgatttgaatatatgaacaaactacactttgtgcctgaaattaaactgaactaattaattgtttaatctgaaccatggaaaagagaaaatctgggaattgaactcattgaattatgtatctatatctggttttgttctgagtggcagggaaaataggtagccaaggctaagaagaagagcactgttgcaggaggcagcaaatgggctagactgactgaatatgatgaagcccgattcagatcagctgagtgccaggagcgctttgacacctggtaccttccaaagaagatcatcctagagaagaaaatcatgtgggaggtactaccagaggggaacccagttctggaggtgattctcagaagccagtggcaaaggttggtgagctttccagagcccagctctagcacgatattgaaggaatttttggccaacgtcaacccagatacattggtgatgtgttgcaaacacatcttagttttaggctagttttagtttagatttcaattaaatcattaggaattaggttagaataagttagtttgtcatttatatttaataatatctcattttattaccaaagtatgttttcagggccaaaaagaggagattcaagccaaaagaagaagaaaagcaaagtgaaggtatggcgcgatctgcgccatgttccgcgcgaccctcgccaaatgccaagatcagccattcagctcgaagaccccgtgcgatcagcgtggaagccacgctaccaacgccacttgatcgaagctaccgcgtgatccgcgctagtaatcgcgcaaaccgcgccagaaggtctgaaggcagctctgactcgtgctatccgcgcgatccgtaaggacatccacgctatcagcgccatgaattcgaactgttggctcgatcagtgccgcaacccgcgcgagccgcgctgcgaaggcgctatttcctaatttaaaaagattgagttcgaaattggcacagaaaatgggctttgttacttgaattaaatcaatctataaataaaggcctctgggactgaagaaaggacacacacacacactaccctggactctctagactctctccatcattctaaacccttggaagtcaagaatcaaggctaggtcactgcagaatcatgttttatttgacagctttggtttctttgaagcctatggcaggctaaatcttgtattgtgggaaggccatgaactgatgtaaactcctctgtaacttgagtggtattgaatgagaattcttattgttttattttactctgttcttcattgttttattcttatttagaattggccattctatttaggtattgagggttaggattcgcaatggggacgttgggattctaatttctgaccttagtaaaataacagttattcattacctagggatagggatgcgtggctgcggaaccttataatatagtcttttacatgcttaacttgatagaattcaccaaggaattgggtttttgatttaggttaaaggtttaattcactaagggattagggattaactaaagtagaaaagatttattctctgagcaataggaaatagcaaccctcatgttatagtcttttacatgcttaacaagaattgctaaggaattaggattgttgttaaagggttaaattgctaaggaattagaaattactaaaatagaaaagatgtatcattgagtgatcaaacttgataaaccagttaagtgaaagaggtagggaacattagggattgtgcctgaccacaattgtttcttccattggtaatacttcaatttattttactgtttattttaatttcagttttacattcaacactcaacacaattctccaaaataatttcttttctgttacttctaattacttagaattaatattgctgtgaatttcaccccaatccctgaggagacgatactcacttacctattttattacttgaaacgatcggtgcacttgccgtagtgtacgggttacgcaacaagtttttggcgccgttgccggggattggtaaacggatttttacagtaattttaatcttgtgattggaatttttgttactaatcgcttctctaagttttatgcgaggttcagttagttctgaggatttacagtttgatccagaaatagaaagaacaatccgaaggagactagctagacaaagaaggagagaagctgaaaattttggctttgattcacttcctgaattagagtctgaagcagagatggcagaagaacaacctaatcagccaagacggagaccagaagatgaactaatggaggatattctagctcctatgttcacaaaacccaactccagtattgtgaggccaccaatacaagctaatcatttcgatatcaacccttcattgatagcattggtggagcgcagttagtttggaggagaagactttgaagacccacatgacttcattgacagatttctcagaatctgtgatactatcaaacaccagggggtctcagatgatgcagtgagattaagtctatttacctttgctgttaaacgaaatgcgttgagatggttgaatagacaaacatccaatagcatctcaacttgggaggacttagtttcaagattttttacagagtacttttccatggataaatataaccgattggtgaatgaaatcaccaactttactcaaactggaagagaatccctatgtgctgcttggaacagattccaagaactaatcaggagatgtccacagtatgatatgcctgtaggtaagcaggtacgtattttctttaatggtatgaatcctgaatcacgcatgattgttaatgttgcagcagggggtacagtaagatcaaaaactgccgctcaaacctatgagttgattaattctctggcctgaaacgaaaatgagagcatgattcttcagccaaagagagaaccaatccagctgtccagcaatgatgccatgcttgcagagcaaaaaatcttggcccaacagctggccaagttgactgagaaaattgatagactacaagtccctgcagctcaagttgctgccagccaaccacatatatgctgtgaatactgccaaggtgagcatgaatctaatgtatgtcctattcttgtctgagctgaccttgtgcaggttaatggcatatggaatgatcaaagacagcagcagccataccagcaacagccttatcagagaaacaacaattttgctgcagggaataactaccagagaaattttcaaggaggaggactagactatacactactaaaaaaataggtttttacatcgctagcttaacatcggttattgggaaaaccgatgttaacgaaaacgcggtggcaaatttgtaaataaatggactttgttaacatcggttttgttaaaaacacctcaaaaccgatgttaagtagttcatattaacatcggttttcaagtttttaagaaaaccgatgttaacgagtctatgttaacatcggtttttaaatttttaaacaaaaccgatgttaactagtctatgttaacatcggtttttaaatttttaaaccaaaaccgatgttaacgagtctatgttaacatcggtttttaaatttttaaaccaaaaccgatgttaacaagtccctgttaacatcggttttgttagaaaacttaaaaactgatgttaacatagagacttgttaacatcggttttgttaaaaaatttaaaaaccgatgttaacatagactcgttaacatcggttttataatttttaaacaaaaccgatgttaaggtttgttagttaacatcggttttcattcaaaaaccgatgttgtgtgtttattttaaaacacatttggccctaaatcattcccaccactgtcgcgcgcctttctcgtccgtcatccctaacctcaagctctcattctcacgcacttctctgtgtccgacagttgctaccaagctctcaagcaagacccatttgctttcttgaacgctctcaagctcttccatttcctttcttcaacgctgaagctcccatttcctcggtgtcacacgctctgggtcgcagttcaagcaaaccacgaacgcgtctccatcccaggtttggtatcacctaacattgcaaagttccaatggtatcattctagcaagttaggtatggttttgcattagtttttttgtgagtgacgaagaggttggacgtgatattggctttatgtcacttttgttgcccactaagtgtttttgccttagtttatttgtgagtcacgaagaggttgaacgtgatattggcttgatgtcacttttgttcccactaagtgtttgataaaatggctaatatgtatttggattgttaaagctttggattctaagttttagtgtagtggtttattttacttgtgataaaacgtatgagctatataccatgaattatgggaatgaaaaagtgatgaacataggcatttgttgtattttatttggttgatttattcacttttggagctgcataggcattgttgccgtaggggtttcaattaaaggtgttatactatgtcatggtcttggtccacttgaaaattttgcttgatcttgtcatgttaattaatatagttctttgcttgatcttgtgaagctagagaggttcatatgtgtatgaaagaagttttgtaatctgacaccacttgtatgatttgtatatgcagttgtcatttgtctctttgcatatcagattcatttgtcattgaccatcctctcaggtacgtacaaatgtttggttatttttttttggcttctatatgtaatgcgtgcgtgtgtaacttaattgttttgtccacatctcttttaactcgtactttatgtaaatcacttgcattccatcaccatgatttctttgcaggaagagcaaccaagtgagcctgaaatcccagttacactgccaccatcagtagaatccaagccaccgctagcctctactccttcgcgaaaggtaagccttgtgttaaacttaaatgtaaagcaattaaatatagaatgcaagtgatagtcattgattgtgagtgaaccttttgtatacaattgttttgtatgtcaagtatgaattttgccttttctatacaattaatgttcattattgagtgaaccttagtttcccgtttgagattcattacagtgattcttccggacagtttggatgaatcattgtattgattcttgaattgtccgtttggacagtttgggaagactcattttttttagtatattcatatgtgtaggttgtgtttttttcttaaatatgatgaaatttcgttacgatgcgtttcactttgttctccgggtgcatacttgattgtggtggaactcatgtcaccgctttcatgtcgtgtactcggagaccaaagcgaaatgctgccaaaattttgtcaaatttaagataagaaactcaatctatacatatgaatatactataaaaaaaagtcttcctaaatgggatagggccacaccttgaatgaaaaaagtgaggcctccatgcatggaataactttgtgactatcacagagttattaattagatggatcgaagttggatgaatgcaagtcgcatcacggttgagtatgaggaaggcgttgaacatttcttgaaatttgcctccgaaagaagtcgaccagatggggatggaaaatatttttgtccgtgtatcaattgtttgaatggaagacaccaggcactggacgacatacgggagcatcttctgtgtgatgggattaagaagacctataccacatggatatggcatggtgaattgacagacacgcagagggtctcgcaaactaaagaggttgatcatgacattggagatcgattagaggatatgatccgtgatctgggacatgagtattttgagcaagcacatgcccctatgtatgatacattggaaagtgattcgaagaagccattgtatccggggtgcaaagagtcattgacactgttgtcagccgtgttaaatttggttaatgtcaaggccagatatggatggagtgacaaaagcttcagttcactgcttgaggtagttcaggagatgcttccagataaaaacacgttgccaagaagttactatcatgccaagaagattctttgtccgatgggtatggagtaccagaaaattcatgcatgtcctaatgattgcatattgtacagaaatgaattccaagaaatgcataaatgccccaggtgtggggtatcacggtacaaactgaaggctgatgatgactgtagcattgatgaaagtacaaataaaggcccccctgcgaaggtgttgtggtatcttccaatcattccaaggtttaagcgtctgtttgctaatgaagatgacgcaaaagaccttacatggcatgcagatgggagaaactgtgatggaatggtccgccatccggctgattcgtctcagtggaagaacattgaccgtttgtatccggaattcgggatagagccaagaaatcttaggcttgcacttgccagtgatgggatgaatccctacgggagtttaagtacccaacacagttcttggcctgttttactagtaatttacaacctgcctccttggttgtgcatgaagagaaaatacatgatgttgtgtatgatgatatcaggcccaagacaaccaggaaatgacattgatgtttatctgagtcctttgattgaagacttggcaaacttatgggacgagggggttgccgtgtttgatgggtatcgtaaggaaacattcaagttgcgtgcaatggtattttgtaccattaacgattttcctgcatatgggaatttgagtggatacagtgttaaggggcaccgtgcatgccctatatgtgagcaagacacgagttacttgcagcttaaacacggaagaaaaacagtttacactcgccatcgacgttttcttaaaccttatcacccttaccgccgattgaaaaaagcgttcaatggaagtcaagagaatgaaactgccccgattccgctaaccggtgaccaagttcttcagcgggttgaggacatccatactgtatttggaaagaacgaaaagaagaccaaaggtaatacttgcatatggaagaagaggtcgatattctttgatctcccatactggtccgatctagatgttagacattgtatcgatgttatgcatgtggagaaaaatgtgtgtgatagtgtcatcggcacgttgcttaacattcaaggcaagacaaaggatggtttgaacactcgtgaagatcttgctgacatgggtatacgtcaggagttacatcctaggtccgatggtaagaaaatttacttgcctccagcatgtcacactttgtcaagaaaggagaagatcagtttttgtcagtgtctgcgccgagtgaaagtgccacagggatactcttcaaatattaagagccttgtacagatgaaagatcttaaactagttggcttaaagtctcatgattgccacgtgttaatgcaacaactgttatccgtggcgattcgagacattttgcctaacaaagtgaggcatgcgatcactcgcctatgctttttcttcaataccatttgcacaaaagtggtggacccggtaaagttagatgacttggaagaagaggcggcaattatcttgtgtcagttggagatgtattttcctccttcattttttgacataatggttcacttacttgttcatttggtgagggaaattaaactgtgtggtccggtttatttacggtggatgtacccgatcgagcgatacatgaagatcttgaaagggtatacaaaaaacctacaccgtcctgaagcttccatagttgaaaggtacattgccgaagaagctgtagaattttgttcagaataccttgagaaagcaaaacctattggccttccccagtcgcgacatgacgagagagtcgaaggaaagggtacacgtgggttgcatgttataacgcctgcttcgcaggaattgcaacaagctcacttgaatgttctgaataacagtaatgaagtcctaccgtatatggttcgtcaccagacattactcaaggagagtaatccaagaatgaccaagaataggctgttgaaagagcataacaagacttttatgagttggtttaaagatacaatatttagtgatgaatctgcatctgaaacaatgaggaagttagcagatgggcccaaaagaaatgttagaagttggcaagggtacgatatcaacaagtactccttttataccaaacaacaagatgacaagagcacaatgcaaaatagtggggtcagcctacgggctgagtcgcagcacttcgctactgtgcatgaccacaatccacgcttggcgtgcttgccgtactttggactcattaatgacatctgggagcttaattatgttactttcactgtgtgtgttttcaagtgcaagtgggttgatatcaacaacggtgtgcgaactgaggacttgggatttactttggtagatcttaacaaggtagcttataccgatgaacctttcatcatggcagaacaagctaaacaagtgttttatgttcaagatccgtgtgatgaaaggtggtcagtggtactacatggaaaaaccattggtgttaatcttgacgatgatgattcaacccttgatattggtgtcactcaattctcgacacccatggctgacatcaatagagaagatgttcttgatgacgttcatgcaaatcgtaatgatcatgatgaaggagaattcattaacatcacttaatgtaagtagactataccaacaattttccacttgcagcttcatttgttttattgtcttgagaggattcatttgttttattgtttttgtgtttgttgatatggttaagattgaattgaatgtaggctttgttcagaatgattatattcatgtgtttgtacagaattttggtttgccattttgagcatatattgaattgatgacagcttttgattgatagaattggcatgtggtggtacatgattggaacattgatagtgaactttgaactttcatttatgataatgcctaaacatgacttatctttgtttttgttttttaacaggatcatgactacaccaccgagctcccctcatcatgtggagtccacacctcctcttgagtcaggacctgcgccgtctacattgaagaggactaggaaagctacacgactgaggtcactggctactagagctcctggtgctgagagactagttgtccatgttgatcctatcactggtaaggcagatggtcctcaggcaaagaagttgaggacctatctaggggttgtggctagagacaaggtagatgtcacgattcctaattggaaggaggttcctacagcgcagaaggacttgatttgggaggacattcaggtattattgattaaagttgtattctcactggatgaattattcaatttcattgttgttgtaattgtataattgaggtgattgtaatgcaggctgaatttgatatacctgaagcgtccgacaatcgcgtaaagaagaaaattttgcagacagtgggcgagcgctggaggcaatttaagtcagatcttacacggaaatgggtcctgacagaaggcaaggaggatgatgccgacgccgtatgcgagaaatacggccttagtaaggcacagtggacccatttttgcgagagtcggcgagccgcttcctgggaggttagtttattttcattgttatacaattaaacaattatgctctgaaactgattatttatttgtaaccatatttgtgtacttcttacaggatgttagaaagaaggctcaggctattcagaggcttaacactgcccctcatgtgttgtctcgtgggggttacgagttgctcgagaaaaggctgatggaggaaaaacagaagaagcaaatggagggagcaactcgtgatgacagcacggagaccatcattcatcctccgtcccctgtgcgacgacacgtgaagtggaagttggctcgcaccaaaaaaagcgggcaaatgacttctgaggcggcacgtgagattgctgagaggattgtaagtgaaacaacaaattatgtacacctttatcaaatttgaggcacctcaatatacaaaactaatgttgtattcattttcgttgtaggattctctggatgagcaatccacacagggcagctttgtcgccagtggacgtcaggatgtcctgactgctgccattggacgaccagagcaccccggccgtgtccgtgctgctggagctggtgtgaccatcacacactacttcggaccagccccatcatcctctcgcaagtctaagtcatccatggcacctgaagacttgtctaaactgaaagaaaatatcagggaagagctagagcagtcgatcacagagagactgactcagtcgatcaccgagagattgactcaatcgatcactgagaaggttacccagcagctgatggtgtccttcagccacctccagtcccacatgcagtctcagggagccatgccgcctccagagcttcagccatgtacccttggtgcccgtgtcagcaccaaggagagctgtgtcgaaccctccggtaatgacccagacaccggtgtatctgacaggcgtgggttgtatgtggatgagcatcctccccgcttggttgctattggaagactttatccggggtcgacagcagtgcattccatccctttggacagtgatcaggtgagggtgggtgttgaggaggttcgagacgcagatgctcgcgtccctgttcccactgacgaggttcagtttgttgggcaggcccttcacaccttccttgcttggccaacacatcttgtacaacctattgttagtaaggtatttcatttcttccttcattgtttgtcatttaacattcatttatttcatataaaaagttaagacagttattgatgatgtttgttaactgtgtaggataaagagggacctcatggaccggcgaaacatgtaaataagccggaacatgctgacgatcccttgtatgagatagcaaagaccatcccggatctcttcttgacacctctgaaggtggcatgggacccacaaatgttcggtatagataatgatgacttcccattgtacatcaggcacgaggatatttcagagatcatccatggtggtcaatgtttgagcatatctgttatacagctgtggattatgtaagtcactatctagtatctaatgttactttcctccttcttttaatttcatgcatctttgactttatttataaacaatagccatatgaatgaggtatgtctgcaatcggatcatcccgatgtgtatggattcatcgagccacagtccatacagagatctggccaatctcaatttgaatccgaggactatctcaagaaatggatgcagaattcacgtaaagatgtctaccttgcagcgtacttgaatgggtaagtaaaaatgtacaacacagttttcttaatgtttgcagtataataacttatttttctccaacgcagttcacattggcaactggtcgtcatatgtcctaaggccaatgttgtcgtgtggttctgctcgttgcaccataggcctgataactatctgaaagcaattattaacaggtaggttctaattttgtaacacatttctgttattatttctaacacatgactatatatgttaattgtacaatatgcatgcatttttatcttaagcagtgctttgaaggcattccatggcactgaaggaaataaatcaaaggctactactaaatggattgcgcttaaagtaagttttttaataaatcatggttcatgtattccaaataataatttattactattcacactaattttctgtttctgtttaacaatgatcatggattcaatttagtgtaataagcaaagaggaagcactgagtgtggctactatgtcatgcattggatgtggacgatagtccaaggaggcttcagggacaactgggaaatggtaaatccctagccttaacactatttttatttttaattgtgactttgtttttgttttacaccttttaatttatgttttattatgtcatgcagtatttcactgacgaaagaccacttgaagaccacacattgaaggctgttaggattcaatggtctaaattttatcttagaattacagatgaaagcataagttaggtggttaaggctagggatttttaaacaattctataaactaggttagagaatcatttttatgtacatatatattgacattattcaattttatttgttattcaaattttattttattgaaattttattttgttgaattgtattatcaaattggttggttggtatggttctggtttttcatttacaggttgaagaactgcactaatcaaaaaacaaaaagaatattaaaaaaaaattttaaaaacaacatcggttttcaacgaaaaccgatgttaacatctaatacaacatcggttttcttaagaaaaccgatgttaacatgtacaatagcatcgattttaacatacaacacaacatcggtttacataggtgaaccgatgttaacatacaacacaacatcggttttcttaaggaaaccgatgttaacatacaacacaacatcggttttcttaaggaaaccgatgttaacatacaacacaacatcggttttcttaaggaaaccgatgttaacatacaacacaacatcggttttcttaaggaaaccgatgttaacatacaacacaacatcggttttctggtgaaacccgatgttatattgtaatcttatacatttataaaattttgtttgtaacagagcaacatcgggtttctgtttcaaaccgatgtcgtacgatgtagttaacatcggttttcaaaaccgatgttaagttccagactttcaacgtcgcctgattcaacatcggtttgaaaccgatgttgaatgtcaaaaataaccgatgttgaatcctatttttctagtagtgataagtccaacaactatctgcagcctcctcccattcccactactagcattactgaacttgagaaggttgtgatgcagctgtctaaaacaaccactgagcacatacaggcaacaaatgctttcatccaagagactagagctcaccacagaaatcaagatgcctctatccggaatcttaaaattcaaattggtcaattggcgaagcaaatttctgagaggccacaaggacagttccccagtgacacagtgataaaccccaaggaacaagtcaatgctatcatcaccaggagtggtactgtgcttacttcactggaagagcctaaagtgaagacaaattcagcagctgaagcagaagaagaaaaatctgcagaaccagaggaagaaaaacctgcagaaaaagagaagaaagagaaaaatactacacctccaaagaagcaatgggacttttctcgtttcgagaagcctccatatccggtgcagaccaagcaacaattgcagaaacagcaatttgccaggttcttagacatgtttaagaagttacacataaatattccatttgctgaggcattagccaatatgcctaattatgcaaaattcatgaaggaacttctgtctaagaaacataagcttaaggactgtgaaaccataacactcactgaggagtgtagtgccatcattttaagaaagcttccaaagaaattgaaagaccctggaagtttcaatatccctattgccataggaaatattaatgtagggagagcactttgtgacttaggggctagtataaacttaatgccattatcaatgtgtaagtccctaggcataactgaattaaaacctattggagtttccttgcaattaacagatagatccttaaggaaaccatcaggggtcatagaagatgtgttagtcaaggtagataagttcattttccctgcgaactttattgtgttagatatggagggtgaaagtaaaatccctctactgttaggaaggtcctttttagcaactgctagggctttgattgatgtagaacatggaaagttagaacttaggatggataatgaatctgttgtttttaatgtttttaatactgtgaaaaatccatctgaccaacataattgttctaggctagattttctggataatgagatttgtgtagatatgacagcatcaggaacagcagcagaaaattcagcacaagcagaaaatgcagcaacagcagaaattgctgcagacttggacactgcagaccaagagtcaccaccagaaaatactgaatctgtgctggaagtgctggagaaaaagtatgatgacattccactggaagcaccaaaggtaaagctgaaacagattccaggcaaagttgtggaaacacctaagaagaagtgggtcagaaagctggatattgcacaaaaggagcatcaaactgcagataaaacacaggtagctgcagataaaaatgatagaacctgtaaagggaagaccaagaagtggcgcaataaaattcgccaaaaagaaattgagccaggacaacaagtattactctcaaaatattgcctgaagtttccaggtaagtcagaattcttttggtctggtcctttcttagtgaaaaaggtttgtcctcatggaataatagaaatcacttcattagacaaggacaaaaccttcaaagttaacaaatgtcggttgaaacttcaccttgaagaccaagtggatgaagacacagttcctattccacttcgatccactaatgattaaacagcaggatgcgtctagcttaagacgttaaacgagcactcttttgatgtaaatacatgcttttcagttctgtttttaatttgataacagtagatttatatttcatgcatattaaattttaggcatttagggttattgcattagggaaagaggtagggaacattagggattgtgcctgacaacaattgtttcttccattggtaatacttcaatttattttactgtttattttaatttcaattttacattcaacactcaacacaattctccaaaataatttcttttctgttacttctaattacttagaattaatattgctgtgaattttaccccaatccctgagaagacgatactcacttacctattttattacttgaaacgatcggtgcacttgtcgtaatgtgtgggttacgcaacaagtggccaggagcagacttagctgggtaaggggtgtccaagttccatttgacgagaagaccattgagagcttcttggaaacccgctatgatccctttgatggatgtgagttatcctttctaactgtattttgagcggtgcacttgccgttatcctttctaaccgtattttgcatatgatccaggatgccagcagcaagtcttggctgacccattcgtccttgattttgcacctgtgtcgccatgcgggtgttgaaatcttagacgacgaacctatggatgttccaatctcatcactcatgggccacaagacctatttggacatggtggaatccgctgctgatgaacaggtaattagagcttcaaagctcaaaccagaggagcttgcagtccgtagtcccagagatgcaccaccaccagatgcgccccagcctacagagccagcaccaccagttcctcccacagctcctgcacattcactgctttatgaggattctccgagtcttctagcttttcaagagtttgttcgcacacaaatgacacttcagacacgtatgtgggaggctgtatgcagacatctaggcattccaccttctgagtaccagcttccagccacaccaccagcagtaccagttacagatatttcccctggaccctcagctgcagcagacacagagccatccattccagagcccccacaggccacagaggctgcagctattgatgagagaggggtgggagatgagtgaacagaacttgttttatttttctgttttgatgttttctatttattttgtattgtgcacttttgacattgtgacattgtgcacatttacatttctgcatttatatatagtccagtttctgattcaaattttttgcaaataaaagttgtttagattaatgtttcgtttgttgcgattttccaaataatgctgtaaatttttcaaaaagcgttgtgaccttatttgttgttgctggggacaacaacttctaaatctgggaatggttgagtatacgcattatttcgcaaatcacagtcaaggaacaaatgacgtctaacaaaaatttttaaaaaataaaaataaataaaaacaacacatcagattttttagaataaaagtgaatggacacagtaatggctaggatttctcgaatgaaagcttgatgaaatgaaaaatagcatgaactgcatgatacatgaatggaattgtgattgttggtatgtgatatgcatgttgaagttgaaatgatgcttgaaatgaagtcagcagagattggcttgagtttgaacacctgtgaggtttgagccagacagtggtaaattttctttccgagagactccattttcatagtactctagaatttgaattgtttctctggatgcaggtgtgacttgatatgattaaggcaattttcttcttctaaaaaccagggccaaattgacttaccttcaattatttttttccatttgtacctcttttgagcctgagacttccatttcaaattcccaaaattcaaagccatatacgttaaccaacctccctgaggctagagaaggtataatacaattccatgataatggaaaacagggagttgttcattaaggcatgaaggaacacaagatgaatccaattggtatggaagctaaagaaataaacaaataaagtccagttggagaacaataagcctatcagctggaaatctgagatgctgtatcatttgttttattattatgtttgctttaaaaaaaatcaaaaagaaggttaattgttctatttttatttaccagttagaataaattgtttgaataaagtaccaggtttgaaagagatgacaagaaacatggatgaccataggattggacttagggattggatctagcctcacattagctactttttccaaaggatttcctacccttagcccagccaagttacaagccggaaaagaccttttgatcaagttgtgcttgcatctgttgagaatattttcaagcttatggtagtactgtgatcatgttgagtgagaggttactacaacctgatacacttgagtgaatgagtggcataaacacattctgtgaggaatactcaagttaaatctcactattggacaaaattgaaggcaccacggaaagctttgatgtgatttgatcatactcaacatgatgattctagggttgtagattgtggtttggtttgatcattgacacttgcttattcttgaagttctttctgttgctggggatagcaactttcaaatctgggaattgtttgatgtgttgcaaacacatcatagttttaggctaaatttaggttataatttaattaaatagttaataaaatagaatagaataggttagtttatctatccttaaccattaatctgtattgatcatgaatctcaacgaccgagaattaaaaattgacacagtaaggaactatagaatgtcttattccaaaatttactattcctctcaaaattacaaatcaaataagtcgtattttactcagaccgataaatagagatgaggttataattaaaaccgctagtaaaaaaataaaatagaatagaataggttagtttattgtttatagttaatttaatctcatttcattaccattgttgcttttcagggccaaaaagaggagattcaagcaaagaaagaagaaaacaaggttcaaggtctcgcgcggatcgcgcaaggatccgcgcgagtcgccccagaggttaaaatacaaggttcagattcgaagactccacgctatcagcatggaggtttacgctagtagcgtgaccaagccgcaagcctcgtgccatccgcgccaaagttcgcgccactcgcgccacaagcccaggatcaacccttccttgcgcagacttcacgcgattagcgtggagtttcacgctatcagcgccgtccattcgaaaggcccgcgccatcagcgccgtgaagatttgctttcctgatttaaagttatctgtttcgaaaattggcacagttttaggctttgttacttcatcaacgccgtgaatttacacacactttcacatcatacttcatcattctaaacctttggaaatcaagaatcaaggctagggttgcagcaaaatcatgtattattcaacagcttttgtgttcttgaagcctatggcaggctaaattctatattgtggttaggccaagaactgatgtgaactcctctgtaacttgactggtattgaatgagattattatgtttgctttaatttattctgctgttcattgtttttactcttgtttagaattggccattctacctaagtactgagggttaggattcacaatagggatgttgggattctaatttctgacatgaataaattaacagttgttcattacctagggatagggatgcatggctgcagaactttataataaattctttcaattgcttaactcgatagaattcactaagggattaggtttttgattcaggttaaagggttaattcactaagggattagggattaactaaactaggaaagatttattctctgagtaaacagaagtaatcaaacttgataaccggttaagtgaaagaggtagggatcaaagggaattgtgctggaccacaatcattcattctattggtaacaacttcactcaattttactgcatttatttctgtttttattcaacatttaacaacgcaacaaacaacttattcacaaataatttctttttacttccaatcacttagacctaatattactatgaatttcacaccaatccctgtggagatgatactttacttacccactttattacttgaaacgagcggtgcacttgccgttatcacaacacaaggcctctctaccagtacggtgtggttcgaggacgaaccaggtggaagcttgtgggtatgtaacatcccgggcgctaacgagggcggggagtgatcgccggtgcagtgaggcacggacaaggagcggctcctggcaggcttccagcgggaggggtacatgaatgaatcgaataaacacccgaacgagagggatccagaggctgtgcaggtatgggactgtacagttgaggataacttaaaggatttaataggtactacctataccaacaaggtgcatctacttttcggtagcccatcacataagaactccacagttaagcgtgcttgacttagagcaatcttgggatgggtgacctcctgggaagtttctcaggaagtgtgtgagtgaggacaaagcacactgaaaagtcttgtgttggtatgtagggacagtcgttgatcctgcaagtggtcgagcgttacaatcccctgtaccaatatcctccccagcaatatcactactcagtcaatatcagtcctacccactacctactaccctaccaattaagaacttcttattaaccacaaggccacccctaaatcggccataaaatccacctgttgcaccaccaagaccaaataccacccctaataccaaccaaaacaccaaccagggaaggaatttcctagaaagaaagcatgtagaattcactccaatcccaatatcatactatgacttactcccaaatctgttcaacaatgcaatggtagcaataagcctagcaaagattcctcaacctccattcccctgaggatacaacccgaatgtggcatgtgcttatcatggtggagtcctagggcattctattgagcattgtatggctctgaaacataaggagcaaagtttgattgatgcaggttgactgaaatttcaggaagacaatccaatgtgcaaactaacccacttatgaaccatgggagttcttctgtgagtgttataaaggatcaggagacataggaattgaagagaaagaaataaccttttgtggtgaagaaggctttctcaggtggagcatcgagactcacaaacatggatggtgcagagttgccttcgtctgtaaattatgacatcatcaagcgatactatgcatgatgcttggggcaatttgaaggtttgtttttggatgtttccggggactcattaggattttcatgtttatgctattattgtaaacaacaatctcaacgttaatagtatggatgaatttgatgccatcatctctcattttctcacgattatatctttacatatttattcaacttcactggaatatgaatatatgtcgctggtttgtttgctcatgtgacatgcgctctagagttgatttccaagtctgcccaatcagaaatttttgcattctacacgtttggtggaggtgtcgtaagcaatgagtaaaattgaataaatatttgattgactgtgtttcaaattaataaataataaatacagacatgcatgtgacctcatgttgtctttcttaaaagttttgtgaagagtgagagtcatttggcttaatctgtcaattgtaaatcttttaaatatttcttgcccttgaaaattgtctttcgagaaccttcaaattttctttaatttcttcttgctacaaaggtgtgacagacgacagtagcatatacatccaaaccctacatcggcgcaatcacagacaccacacatgggctccaagcgaactagggccagagaagaagttctcactcgataggttgaaaacgcacaagggaaatctaagcaaaagttggggtatatgtataaaaaaagaggaaaaatgaaaatgaatgaaaaaaaaggaaagaagataaagaaaacaatcacgagcgttatttatcaaaggttttgtcccaaaatccaaattgtaagagtttctagtcaagatttgaaatgacacatggtcgtgtttcttcatcccaaacactaatttatcctttgctacccactccgagtcaaagtataattgttttctattaaaaaaaacccacagtaggaaccaccaccaaactagcaggaagagcaatgcaagcaacatatgcatgaggtttactgagctctaggttgggccccaaatgatgttaaagaaagcaaattcgccaaaggcgagcaaagcaaaaaagagacaagttctccaaatttcacaaggaagacacaaaagtgcaatgatggtcaatgtataagacaaatgaagtaaagcctcaccaaaaagttgaaatagagaaaactacaagcaaggagctcaaggttcttactctatataacccttaaacactctttgagcctccctggcattttctttcacaaccctcttaacccttggccacgttacaaacccaataaagcctatgtggattaaggaaggactaatttcgcttttgagtttgtattttgaaatggaacacgcacacgcttgtgattgttaagataaaaaaaaagaatctcgaggttcgcacttgaacatttgagaaactcattcagcaaggagctcgtggaagatgcctaaaggcaattgtgatagtggggtccattcaacgtcaatcgctcacgtagagtcccaagggttcctttcaaatccaaggatagtttttgttgcataaatcctttcgagatcatcccatatcatcaagcttcaataggatcgatggactcatggcatccctctatgatcttaaatcaggaaattttcacttggtcatataccaaaccattactatccttcaatggttcacgaggtcaatctcgaagccttatatttccttgttgtgcagagcaattgaagtaaaaaaaaaaaaggacaaaccttggaatcaatatttcagttgattggttaaacgtcaattggctccactgccatcttccaaaattaccaagtgttagatacagggggagcatgaagaaggatcaagatgtatgctgaatcttggatgagttttagctttgtacatatcattcaattgaaggcatttgtaatatttagatgtataagagttacatcttatgatccacaacattgcataaacatcattcattggcttgcatttatgatttaacaaaacaacatggtctgtgaaaaagctttaagatttcatgtttgcataaagaatccaagtattcatgattaagttttggaaaaaatcactttttacactgaagtaatctattaccataattaagtttgtctgctttaattgattacaaagtaatggtaatcgattacacatcacaaaaacacataataagtctgtctgctttaatcaattacaaggcaatcgtaatcgattacataagcatgttatgaatactacactatctgttttaattgattacaaggcgcggtttaatctattacattgctcatacatcttttccagaaatctcaagaacattttaatcgattacatttgtatttaatcgattacaaatgaagttttaatcgattacttaggtgatttaattgattacattcagttacaacagtttgttataaatagctgttgagtcttttgaaaattacaactcactacattacgaattttcatagttttaaaaagccttctgaagtaagaagagattctttgagtaaaaaagctcttgtccacatattcaaatcttcatggtgtattgaaagatttcttgggtaagatttcaaagaagcttttggagagtttggtcagaaacttgtttgctttcaaccttgatcaagattggtaatcatatgcattcatatattgtggatcatcaagttgtttctctccattggtttctgtgtgtaatttgtttttacatttcaacttgtaagttgcaattacaaagaggttgtttaaagcttttctagaataaggttctctagagggaagagtagagtagggttctctatgtcttgatcattagaagtctaatataatagggttttagatttcagttctttatctaggattgataaagggtgatcttttgtaagcttgtaaagaatagattttgttaatagtggaactttaaccaagaaactgtatgtagcttctcttttttagaggtgaactagtatagctctttgtgttgattactttctttaatctcttcttatcatcttaatctgtgattcttggtgaattctttattactcaaaaagttaagtttttgtaattgttttcttgggttgagtgatttggttgattgaagcattctttgtttaattgtgataaagatcctaaattcgctgcttgttttaaagaaattttaaagactctgttttaaccaattcacccctcttcttagttattgtgggtgttctcattgttttcaccaagcaattggatcaaacaaaacattcactctgagggagtctctgaagagatctacaaaagtcaagatgaggttgcatgaatcatcacatcttttagaaagaaacattcaatctgtgtttttcacaaaaaaaaaaaagaaggaaaaaagaagaccaagtataacaagagagaaacaatgttgtaagcattgcacaatttatggctcatctcatcccagaatgttgaaattcaacatatctcacttttatgactcacaaacagtcacattgcatttttgggtacaaagcccacatttactgcattttaggacgaagctcgcgtgtctcttttcattcatcataatgcattccaaactcatatgcttcatatcaggttttaagtgcatagttttctctttaattatcgttttcttgagatccagtttggggtaactggtcgtttcagaaagtcaacctctcagtacctgttggcaagtttcataggactcaatgtcccctgcttttatgtttcataggactcaatgttctcagcttttatatttcataggactcaacgttctcatcttttatgtttcataggactcaatgtccatagctttatgtttcataagacacaatgtcctttgctttttatttttcataggactcaacgtcttcagctttttgtttcataggactcaatgtccttagatttatgattcataagactcaacgtcctcaacttttatgtttcataagaatcaacgtcctcagctttatgtttcataggactcaacatcctcagctttttagtttcataggactcaacgtcctctgctttttagtttcataggactcaacgtcctctgctttatttttcacaggactcaacatcctctgctttatgtttcacaggactcaacgtcctcagttttatgtttcataggactcaatgtcctctgcttgtagttttataggactcaacgtcctctgctattagttttataggactcaacgtcctctgtttttagttttataggactcaaagtcctttactttttatgtttcataggactcaacgtcctcaactttatgtttcataggactcaatgtcctcaactttatgtttcattgactcaatgtcttcagcgtttatgtgtcataggactcaatgtcgtcggctttatgtttcagatgactcaacatcctcaactttatgtttcacaggactcaacatcctcagtttttatgtttcataggactcaacgtcctcaacttttatgtttcataggactcaacgtcctcagctttatgttttataggacccaacgtcctctgctttacgtttcataggactcaagtcctcagcttttgtttaaagtacttaaagtcctctacattttgtttcacgagactcgtttccctgccttgtcacattgaactgaaagttcctttttattgatacaccaaatcctatttttttgaaggttcttcgttctcatgttgtgatcttttaaaggatcacccgaacataattagcctttacttatcttttattttcaataaaagataagtaaagaggggtagttgtcatactctaattctgtctgggtcccaaaaaaagaaaaacaaaagagaacagttaaaagaaaaaaggggggcccaaagggacctaatgactctttgagagccctttaggtcaagtggcaacaatacaaaaacacaaagaaaggggactttgcattaattacatagacaaggcacgaatcccagaaaaagaaaatagaccaatcaagcactgccatttggcaacgcaaccagaggaggaagaagggtctctcaggtatcctcattccctccatttccgctcttcctctctcttccttctctcttccccttccctctcttcttcttcgtttttctcatttttttggtatgtttctttttgtttcatctcatctacgatcaccttcgtcgcctgcgagagccttcagagccacctccgaccttgtcgtggtggctcgaggtggtgcaaagttcctttcttcctattctcttcccctcttcattccctatcttctcctttttcctttttttttttttgtttttgccaccattgcgacaccactgtcatcgtcgcccctcgtgccgccaggtcccccacgctgatggtgtcaaggggcctgcatcctccgcggtgatgcatcctaccttctccacgccgtttggttatagtggcaccaagggttttccaaccttgttgctactttcgagttggttcgggtcgctctgacccagttcaaccctagcccaaaaaaaacaaaacttaacttatgctatttgcacctcccatttccatacctacactcacttaccttttgggcctgacctgtttagaacgaaataattgtcactgtttacacccttctttttctcacctacaacccttatgttttgggcctggccctttttgaataatataatttatactatttgcatctcccatttccatgcctacaccccttaccttttgggtctgacccattttgaaatgaaataagcactgctagctgcactcgctttcttcatgtatacacccttaattactaagtgtatttcccacttctattctattcctttttatttccatttgttttattcatttatttttgcaattccactttagtattctttagtatatgcttacgttccgtacactccatgttgggctccgactcacttggtggtgtttcaataatgtgtggatagattttggaatgtcatgctgggtccccgacttgcttgacttcacagagcttactgcaaatccaaaatctttttgaaaaaaaaatctaaaaatactcaaataaattatcactcaattctcctttttctccacaggaattacacattactcgaaatcgcttcaaggtccaatgccttatgcgattctctccgttttttctcaaaattcaacgtcgtttcaaggtccaacccttagcaactctttgttgcgcaattaaaacaaatctttcaaaaaagataaagtcaacccaacacacaagctattttctatctgtaacaccctataggccttcgatgtgttatcattaataatatcagattagcgcttaaaacctagtttataaaaactcaacggaagcatagaatcgcttttcttaattcattatgtatggaatcacacatataaccgataaaacacaaatcataacatatatcacgtccctgctgatccagtttctcacattatacatcataaagacagataactacgaagacttaggcagattatcaaatatacaacagatatatatatatatatatatatatatatatatatactcagggaaagtctcatatcataaactcaaatagttttgtacataaccatatacatcagttttcacaccactccgtggtgatacaaaagaataacagccctcctcgagggtatacagaactatacataagtacaaaaccaaaataaagccttcaagctctccatgccgcttctcagtcaagcagcctagtctctgctgggcctcttgccctgagaccgatcttctcttctagcaaggtcacctgaaatcatataaaccccacacggggtgagataacatatctcagtaagctcagggtcattgggaaatcattcccaccctggctcacagatccacaacacacaaacaggcaagcatagcaaacatggcccattggcctggccctctggccctcatcatatcataataatcatattctcaacacatgacaggtggcagagctcctcaatgcctagcggagctcctcaacgccctgacggagctcctcaacgtcagtacctgtcaatatatggcagagctccttaatgccatgggcggagctcctcaacgccctgaatacccgacagagctcctcaatgtcagtattcatctattggccaacagatatatctcaatcataacatacatatccaatgcagatacatacaagatcaatataaacaatgtcacaaccaatgcatgcatcatgaatcatgaccaacactccccaggagtgtggtgtgcaaccaaaacgagaattcatccccagagaacactgaacttacctggtaaggtctcagtctgcgattccttcccaggtctgtgactcccgccaccaacagtctcagaatcaaagcctaatcaaggcacatatccatatcaaaataagccctcaggcatacaattcacagtacataacataacagaattcccctatcctagagttcagtcacactcagccccacacaaggctgttcacagaccattccaggtccctcaaggctgaatgccaagcctcttagtcatctggactcaatacacaaacatacatggcatagtttcctcagccttaacctcaattatcactagaacggactaagttccactccaagtctcgttcaactagccacttgggctcagcacaacacaatcaaggctctagcctatcaaagaaccatcaacaaatgactctacacaagtcacacaggcatatacagagccaagattcaaagtcatctaaatcaaaaactgaaagctaatccttcatctattcatcgctctaaacaagtttctcaacaggaccctgggctaattctagccccagctcatatgggtcactattcacagggaaccccaaggataaaaattaaacggagaaacttgagtctcttacctcagtggcgactcagaagatctcaagacagcttcctcaagctctattgtcctttccaagccttgagtctcgtccactctcaagttctctgagatttcgcacttgagaattcacttctcactcaaaatggggtttcaagagtatgaaatgaaggattcaagcttcacaaaggtttcactcacactcaaaggtcatcatgaagtgtttaggctagtatatagggtctcagaaagcttggaactgccattaatggaggtccagggaagaagaaagtgactttcccttccattttccgcgttttgacccttttatactcagcctgcccgaggtctggcgcgatccgcgccacaatgtcggtggactggcgctaacagcgctaaccccgcgccatcagcgccaacttcccgagacctgtggcgccatccgcgccacctctggcgctatcagcgtgaaaatccagagaaaataggtttttcagggcacttgtggcgcgatccgcgcggcccttggcgctacccacgccaacctcttgacctatccacgccaccagcgccatgtccacgctaaaaacgtgaactggccgaacctatggcgccatcaacgccacagccaatgggtctggcgcgatcagcaccacacccaaaactcagttttctaattaaaggatcctggccaaaagtgagggtccttacactatcaaagaactacgtaagtgtgatttcctcattgcacttggggatacgtaggagcaaaaggcaaaccccttgtcgacctaaaaaactaaaaataaaatataaaatcctttcttttctaaaaaaattgatttatttttctgaataaacaaaaataaaacaaacataagcaatgttcttaagggaagacaaataattaaaaagtcactttatttttagtacactcgataaaaggttattgtcttcatgacggacggtggggtgctaaccccttccccgttcgtaaatgattctcgaactctttttctctaaaattgtagaccatttcttatctgttagtttttccaacgttttccttaaataaaagttggtggcgactcccctaagttttcatttttaggaaaactccttctttattttattttttgcccgttgtgaccaaccacgttacaacaataagcatagtgttgattaaaaaaaattctaacagtgtaccaatcattttattttttgtaaggattaacttaatgactatgcatttttattttagtctcatattttgaataaaatattgtcagattagaaattttagaacaaacagattatgtttattaatcaatattatacttattattatgtttgttctaacttatgtttatttgcttttttataagtgcttattgtaaaattatgcttgtaacaataaaaaaaaggagaaaagataaagattaaattatatttaacccttaaatgaaacgaaatttggtgtctgacgaattagtccaattgaacttatttacattttagtctaatctatttagcagtcatgttgacaattatttttgtgatatttttgtcactttgtgttacataagctctttcattaacaataacaaacgaaagttaacatattgatgaatttgtcacacttttttcattttcggtgactaaaatttgaattttaatctttcgagaacgaaattgtaagtgttctacatattcaaggacgaaaataactatttgttctcttcttttctttcacttttataaagaataagtcaaaggactcatttataggttaaagttcttaaagatattttctacgttcgcaataatttttgctaaaactagtatgcaattcccttttaaaaaatatacataatggagtatttcttaccaaggttttttgaccggaaagctaaatagttctctaactgtcatgttaggacaacaattaactaaatctttcttcttcttggaattgaatgataatattataattcgaactttggtatatatatatatatataattagataggaattgaattaatattttatataaaaaaaatatattataaattgtataagacttaaaacaattgttaataactaaataataatcatatagaaaatctatatctatatttatttatttatttatactatatgcaaaagaaggtatggtaactttacacaggtgtcactttcttagaaactcatcaccttatcaccttacaaaaatttaaaagcttaattatatatttttggcccctaaagtattgcaatcataagtttttagttcttttaagtttcaattataccaataagctttcttaggtatagtaaatgtatggatttactcttccaaatttcatttgttttaataggatctccttaatattataattatacaattttagtccctcaaatttttggaattctgttattaaaattatttttaggacaaaattacacaattatgataattgaagattacaatcgtacaattgtgataactgagaaatccaattaacaaattaaaatatgtgaagactcaaattcattatttaaagggacttaattgacacatcaaaagtacaattaagtcaaaatttaacgattaaaagaataaaaaaattaaatcaaataatctaacaattcaattaaataacaaaattgtttcatctctttcttcatctcatataactctctttcaaaaaaaaaaaaagaaaaaaaaggcacttcctcttctcattttgttttcccaagctacgttacacttgggtacccataaagtttgtcaataatattaatacccgccagatatggaggcttttaccataaaaccaatcctacaaactatgaatttgtacatgtacaaaccgaaactagacggaggctacggtgtgtaagttaaaccgaaaccagacggaggttacaatgcgtaagttaaactttttatgcattgtacaaaaagaaataatagccgttagatgtgagatgaatgtgagggtatcgtagaattgtgtacacagtagatttttttttttctatgcttcacaaaatacccttgagtcatagttaatcctatgactttccctgtctccttccctacaacaaccaccatgaaacctgcaacgaaaaaggaagccaatagaaccatcattgttctacgccagaatgcacacatctatccttctccctcactcgctgtctgtcttattctcaaatgttgccacattgttccgcacattgtgccaaacttgctcctctgccgcgccaagccttcaagccatcgtgaagagcatgacgatgacacatttaacgaatgaaaacatgggattcttaaagtacgattctatatctagagattctgttggaatttaaacaaaatagaaataacaatatatatatatatatatatatatatttatcaaactttttaaaaataactcccttcctttcatttaacagtgctacgacacttttacttttcttctttccttacaactcttttttttctatgtctccttatgtcaaacacatttcaactatttatatagtttatccattgaaacattttccttccatcgcttctaaccgattcaacacaaggataatcatcctattcatcttttatggaaatgacacctattactaatgcaaggacaaataaaccacatgattatatactagaatgacacaacattttttaatttctcaagtcttctaaattcttctaacattttgtttttctaacactccccctcaaacttgaatttgcactccaatcatttcttttaatttgatgaacatatctgccttcaatggctttgtgaaaatatatgttatttgatcttcagttttgcagtagattaattccacaactttattctgaaaataataggaatactcacaacaaccaagaggggggtgaattgattaaaaccttgatattttaaaattaattcaaatcagagttcaggatctttatcacttttaaaaccaagaaatctttatacttaatcaaacaactcagccccaagaaatcaatagctcaaaatagaacttgtttgacaatggatatgaatcaaagaatcaatgaccaatgaacaagatgagtaatagagaaatacaatcaaagacacaagcaatttatactgcttcacttcacaacagaagctacatccagtttcttctaatcaacactagattagagttccactattataaatttctgttcttacaagcttttacaaaaacctcccctttatcaacactagataaagaatagaaatctaaaaccctattagaattctaaggagcaaaaaccagagaacactactctgttcttgagctagagaatccttctctagaaccaaacaagaagaacccactttacaatagcaaatcacaacagaaatttaaaaagaatttacacacaaagattaaggagagagacaacctgatgatccaatgaatgtaatgtacatgaattaccaagtcatgttgaatagaaaactaaatcagatcatgcttttccttaaccttgaaaagttttttgctcaagattcattcaaagacccattgatgttttgaatgatgcaagaagtaataacactgagaaaatcactttgaaaggcttagaaggcttgtgtatactcagaaatacgaagtggtcaagttgttaaacaagccaagccttcaatcttatttataacagaatttgtaactaattgtaattgattaaatgcgcctaataatcgattaaaattcttatgtaatcgattaaaatatcacttaatcgattaaagtgttaaagaagctttctgggtttcagcaacgagcaaaataatcgattaaaccgagctgtaatcgattaatacagaaagctctgtttcacaaaatgaactatgtaatcgattacgaattttggtaatcgattaaaccagaaaacagtcatttaccaaatgaactatgtaatcgattactaataatggtaaccgattatcacagcaaggcttaaaataatcttttaactatgtaatcgattacactaagtaagtaatcgattaaaacctttaacaaagcagtttattttcaatcaaaggccaaataatcgattaattcgataggtaatcgattaatttgttcatgaaggttattccaaattgaacgaagaacaaaataatcgattatatcattaagtaatcgattaaaacagtaagaaaaacatttttccaaaaaccttttaatcagattcaaaccttaaccaaaaaagataaaacctttgatgttttaatgaaaaccatttaagcttaataatgaatgaatgcaatgcaatgcaaggatcaatcagattgtctttctcttacacttgaatcaattacaaaacttcaaggcacttcatgcatgttgaaagctcaaaacacatttcttgaatcaaagactttcactcttcatgatgctccccctatatccaacatattcttcacctgctctcggataaagtgatactttgtgtcaatgtgcttgcttcggctgtgggagactggattctttgcaagggatatagctaacttattatccacataaatcttgattggaccttcctgcttctgatacaattcattcaaaatattcttaagccaaattgcttgacatgtgcatgctgctgcggccatatattctgctttacatgacgaaagtgcagcagtctgttgtttcttggatgaccatgaaaatacttttgaaccaatgtgaaaagcatatccagaattactttttcgatcatttgtatctccaccataatcactatttgaatagccaattaactttgaatcttttgtatgtgtatacaataatccatgatgaacagttcctttaatgtatctcaaaatccttagttgtactgaagtgatcttgtctcggttgctccatatatctgctaactaagccgattgcaaaaataatatctggtctagtaaaagtcaaataccttaagcttccgaccaggcttttgtaggatgtaggatttattagctctctatctgaatcaacttttaacttcattcttgcttctattggtgtggagactggcttgcactctttcattttgaactttctcaaaatctcttatgcatatttcttttgtgacatgaaaattcattctttcatttgttttacctcaactccaataaagtaagacatttctccaatatttgtcatttcaaattctttaatcattgctttcttgaaatcataaaacatacatggattgagtaaaatcatatcatctacatataggcacacaatcatcatatctccatcttcatttttctttgtgtataaagcatgctcatatgggcccactcttttgaaagtactcatttattctcgtgttctaggctcttgtagctggctttaatccatgtagtgccttcttcaatctatagactttatcttcctctccttttttgatatataatggtggttgctcaatgtagactttttcttctaggtaaccattgaggaaagttgacttcacgtccatctgatatatcttccattgtttttgtgctgcaactactgtaagaaatctaatagtattaatccatgcaactggtgcaaacacctattcataatcagctccatatttctgtttgtagcctttagccaccaatcttgctttgtacttctccaccttcccttctttattagtctttgtcttatacacccacttcacaacaattgacttttgaccttcagacatagttgtgagctcccacgtatcattttttattgcatcaatttcatcatttatggctttcttccacttttcatcttttgttgcttcttcatatatcattggatcacattcagccattacacaaaataatgaataatcaagtgtagtttgaactacatctgtagcattataaatatcgcttaagcttctcatctttgctagtgctccccctgaattgttactactgctactactttctgatgttgatggtgtagatgctagagttgatggaatagatcttggtggaggagtttggtcatttccttcttcatttatttgctattttgactcatcatcatctttgaagaatatgccttccactttcttttcttcatcgctccatctccaataatctacttcatcaaactttacatcttgtgaaataatcacctttttggttagaggattgtaaagtctgtagccttactcctaaggtcatagccaataaaaatacatttctcccctttatcatctagcttctttcttttctaatttggaatatgggcatatgctatacaaccaaaaattcttaaatgacttacttctggtttcttgccctccatgcttcatttggagtcttaaactgcacgttttttgttggacatcagtttagtagataggcagcacattgaatagcttcagcccacagtgttcttggcaattgcttttcccttaccaagctccttgccatatcaagaatagtacgattctttctttctgcaattccattttgttgtggactgtaggcagctgtcaactggtgaattattccattttgtatgcaaaattcatcaaacaatttggaagtatattcacctcctctatttgttctaagtatcttcagggattgaccacttagcttttccgccattgctttaaattccttgaatttatcaaaggcttctgctttttctttgagtatatatacccaagcttttctgctgaaatcatcaataaatgtaatatagtacctatttcctccaagtgatggaatatcaaacgggccagctatattagagtgaacaagctctgatggtctttttagttctcgatgacttgccaacttcaaagctttgtctatgttgctttcctttcatacaactttcacacaattgattaggatgattaatttctggcaatacattcaccatatttgcttttgacaataacttcaaaccagtgaatccaaggtgcccaaatctgtgatgccataaccatgaactatcttttatgatggactcatgcaccttattacttctgcttggatattcggcttaaataaacgatttcttgtcatatcaagttttgcaatcaattctcccttttgatttttaatgatgagagtattgttcttcaaatgtatatcataacctttctccaaaagttgaccgagacttaggagattacatttcaaagaaggtatatagtaagcatctgaaatatagtttctatctccattctttgtgaatgtcatatgaaaataatgagaaaacacacaataaccaagaggggggtgaattggtttaaacttggcctttttaaaatctttataaaatcagagttaaaggatctttatcacaaataaaccaagaatgcttcaatcaatcaaatcactcagcccaagaaaacaattacaaaaacactacttgttgagtaataaagaattcaccaagaaccacaaattaagataacttgaagagattaaaagaaagtaatcaacacaagaacttatattgcttcacctctcaacaagagaagctacatccaatttcttctaatcaaaattagattagagtttcactattcacaaatttcagttcttacaagctttacaacaatcaccctcaaacctagataaagaatagaaatctaaaatcctattagactcctagtgatcaagacatagagaatccttctctactctttccctttagagaaactcactctagaaaaacttcaagaacccatgtaatagttacaaacaaccaaaaattcaaagatgaatttacaagcaaaactaatagagagaaacaacctgatgatcaaatctttcaaaacaccatgaagatttgaatttgtgggtcaagcactttagaactcagagtaacctttctcaatctcagaaggcttatgaaaacttttagaattttgtagagttgtaatgcgtattattttagaaaagcttttagttatttataaaaaacagttgtaactgaatgtaattgattaaatcgcctaagtaatggattaagtcttcatttgtaattgattaaatacaaatgtaatcgattaaaatattcttcagttttctggaaaggttatatgaacaaagtaatctattatttcgacctgtaatcgattactacagggatacattgttccataaatgaactaagtaatcgattattgataaatggtaatcgattaaaatagtcatgtcttgttctatgtttgaactaagtaatcaattactgataaatggtaatcgattaacacaatcatgtcatgttctatgtttatgctgagtaatggattacttaatgttggtaattgaatattttgttcttcaaagctcaggtaacaaattatcaatgtgtggtaatcgattaaaacagttaaaaaatagtttttccaaaaacttaaaaccatgagcactttgctttgatgcaatcatgaaatctcaaaccttttcacaaaccatgtgcttatgtaaaatcatgaatgcaagtaaatgaatgatgttaatgcaatgcaatcggtcataggatgattctctcctacatcaagcaattacaaatgtcttcaattaaatgacatgtacaaagctaaaacactcattcatcttcatcatgtatcttgatccaccttcatgttccccctgtatctgacatcataattttacctttacctttgactggagtctttgattgatctccgaatgtaacttctccttgaacattctcattcaattctgtaaataactcctttttaccacacatatgattggttgctcctgtgtcaagataccagacatttttgctactatcttcttcacctttgtaagtaaacaagatagttggttcatcaattttctcttcatttgttgtataatgactactctccgcaactttagtagcatctcgacactcataactgagatgaccatatatgttgaaattataacactgcaaattagatttatcacctcgttgttgagatcttcctcctcctcgggttatgaaaccacgacatcagccacgattatatgctccttgactatgtccatatgttgctgcatcgatctgaaatcttctatttgtttggtcataactattgcatccaccacgaccacctcgagtgttgaatccatcttgggtgttgaagcctcctctatatccaccatgatttcctctgccaggtccaaaattgctcctagcttgatttccatcaagagacaactttgtttgcatagcttgctccaaattactagaactttcattcaacgtcattctttgcttgtgagattgaaaagaacccattagcttatcaataggcatcactatcaaatctttagcttcttcaatggcaatgacaatatagtcaaactttcttgttagtgaccgaagaaccttctccatgattctgacttcatctaaggcttcttcgtttcttttcatctccttggtcaccttttgcactcgagagacataatatgtgacttgctgtccactttgcatctttaaatttttcaagcccagctctaagtgattagagtcgcacctttttggctttgccagctccttggtaggatttctgcaagattccccatgcttctttggatgactttgcgtttgagattttttcaaaggttgattcatcaactccttgaaatataaaacatagagccttcttatccttcttctatgacttcttaagcgtccttctttgagcatatgataaaccagcttcggcagtggcattaacggctctatgtgtccatcttcaataaggtcccatgcatcttgggaacctaatagagccttcatctgaatgcttccatttccataatttttttttgacaactttggaatttgtggttgcatcatcttcgccatctttgatcgaacgtggctctgataccacttgttggaatttaaacaaaacataaataacaaaagaagcacactgcactatatatatatatatatataactttttaaaaatgactcccttcctttcactcaatagtgctacgacacttttactttcttttttccttacaactcttttttttctgtctccttatgtcaaacacatttcaactatttatatagtttatctaccgaaacattttccttccaccgcttctaaccgattcaatacaaggataattatcctattcatctttcatggaaatgatacctattactaatgcaaggacaacgaagccacatgatcatatactagaatgacacatgacattttttaatttctctagtcttctaaattcttctaacagaggaagagtttgtttttctaacagattcttgagttttttctgtgatgggttttgacggatctgaggttttgcaatcatattcggttgcgcttgagagactcagcaacatttgtggaagaagacgacgtcgatggtgacggttaacggtggtacactacaaaaaaaatagtgcttttttggcggtttggttttggcggtcccaataatccgccataaattgttacaatttttttaaaaagttaaccatcaattacgcatttcaaaattttaagtataatatattatatttttaaacaaaatgcaaacagtaccgtacagcagtgtataattttaaaaaaatcccaatctcgtgacccatactctggcacccacactccagcacctacactacactacagctctcatttagggttcttcttcttcttctttctctgccttctctctaacgatctcaggttcaattttccgatctggaagcactcatggctcgttagtggtaaagaatcttttgttgagaattatttatcccaggttccatagaatgtctttgttggaaactctgtttctgtttgatgcttttgttccttagattgaacttaaaattatttatctcaggttcattggaaacattgtttctgttctaagattcattcattcggtaagcttctatttccataaagaaaatgaatcacctccttctttcttccccactctcaacgttcattattattattattattattattattattattattattattattattattattattattattattattattattattattattattattattatctttttccataataatgccatactgtattattttaattttgtcttccttgtttgtaacaatttttgggatgtgtaatttttttattccttctgttttgccaaacagtgagagttatgaatgggacataagaggaagaatcgatctaatagtgccacaggtatacacattttatctatctacttgctttagactcaacaacagtactagtagcttcagttagttgctttaagcatgagttagctggactatatatcttgtgtgtaaagtttggaagcttataattccttggtagtttcttttctgttttttcccttttgaatttttatgcactgccgagttttcccttttgatgatagagaagcttattgatagatagactttaagtttatgctttaattgttttatgttgtgtctaccctttcatcactttaaatgcatgggtaaatggttcaattgtaaattagttccaatgttcagagttcttttttatttttgagttcacattcagctaaccggttaaactttactaataggatttgtttttgtgcttatatctactctatttcccatcctcttattttttcccttttcttatttcataagtccattctgctttatcttttagaattcttttcttattattgcttggaatttttgaagggagatcatagaaacagtaggtcacgtacctaaatggaacttgctattcaagtactcattataccaaccatagtccaagtgacaataagcttgattctccttatgctttttagaactttgaatggaaaaaaataagcactgcaagaattttacccaatgaatctaaaactcaaaataagtcagagtctaatgtgactagtactattggataatgagtctggaaaagaaaagggacgagaaaaaggtactcattctcatgcatttctgcatagttacaaagttgttgcttcatatggtaccagtaaacatgacaaaaaagaagcttcgaggaaaaaaaatctgggtttgcagattagccaagccacaatcaataggaaaaatacaagtttaatcaaaatacaagaaaacataatatcccaacaaaactgtgaaagattctaattatattgtaattgtatgcctcttttttatttttattttattcatatattatttctctttagatattttagttcgtcttataatatttgttattttagaaaattaagaaagtatttgttattttctggttatcttttgcttcttttttttagcctttataaggttgacatattatcaaacactgttatctacataaagagtgttgttgtgtggtttgtgtagcattcatttctgcctattaaattttgaatcttgaaaattctgtattgccaaaataatgcattcctctttaaaatcattaagcattaggaaaatgaaactgcatctacttaggtagttttctacctttcttgtttcaatggacttgaacatcattccttgacttgattcccaaagctcagacagcaaactgccaagcttggctctaacacaacttaacaccaaacataaacaagtgagttgtgttgtgttagacacacttaaaacttactataggaatcctaacttttcgtgcactagaaaaatatggtaaactacaaattttcttaaattcttgaaaaatcccaaaacacaatttacatatactggatatgcaatctataactataagagtaaatagtaagctattgtttctgttgaaaaggctattgttttgttcttgtttctgttgaatgtagcttcttctataaatcactaaatcccttgttatttattgaataactctcccctttttttcaaaccttacttttttgtgccatgtgatgttaacataagcttgctcagaatagagattgatacttataaatttgtacatagatttgtagtcttatgtgaaaaatcaagttttacttttgaagtcaaaaagtaatttccaaacatgcaattcttcatctttctagtgttggatttacatttgtactgagttttattgtagttgaaaaatccactgccatttaattaatcattttgtatatcaggctgggtttgtgaattccttggctcttgcaaaatcaggagaatttttagttgctggagttggacaggtgaaattttgctcaaactatgtcctgtttgtatgctttttttttgtgtgtactatttcctgaaatttcactagaaagactgtcatggacagaaaagctgtctgagcatttcaactttctagtttgaaaggtggacttttagtatgataataaggaaattgataagagttatgttatttaaaactttttttatgaaggtagcataaaactagaaattttgttttgttgtttgatttaatgatgccttaaactagaaatttgccagagattagaattaatgaaagaaaacattattaatgttttccaaggtaacctataccgaaatgaataaaagaaatatcagctaacaattgcagctttgctaatattaccaatgtaaaagaactcctcgagctcactatcactataataaaaattgcagttaattactaaacaaattataaaaaactacacttcactttttatttttatgcagaaaaaattgaataaaatatgcttttcaagcctgttgtttagggttgaattgagcaaactttgccattcaattctgttaattactagagatgtggtgtttgaccacttaatttgtaagcaattcccaaacaattacaaagtgcacaaactttacttcatagaagtattcaaacaatggaatggtaacttcattccatttcaatttatttcattgtattccattcatcatcaggtatccaagcatatacgtaaggattgttctaaattttactgcctctcacttgctcaagttttctagtgtgtttggatttgcgtctcgcaactacattttcatgtcaatgatataaaaaacccagaagcaacgttttgttgctttggaaatgacatgcatatgccggtctaatgcgggcatccaaacatattattcttgtactccactagttatctatttatcatactggctctactaactaatttctttctacttatacaggtgggattgtgaataacacattaaggccaacaataccagatcattgtgattctgaatggagaacactgatggagcagtgttgggcacctaatcctgcagctaggccatccttcacagaaatagccagtcgattgcgcataatgactgcagcagctagccaaaccaaaacacagaaggcatctaaatgattgaaacagatcctgatgttgcttccccccttacaccaatgttggtattgatgctttttcttgataaaattggatactgttaaatttattcattgaatggtactccgaggctgtattttattaccaggggcaatgctatctggtacactattattttcttgatgattcaatgctcgcctgattaattttttttttttttgtacattcaactgctttaatagaaattcagatttcattttagtttgtttgggtacctatttttttctttttaattttcacattcctcttcctttactattgccacatattggagatctcacattcacatcgattattgacatgaccaaagtaaaatatataattgtgggactactttcacaagctgattttgataaataagttatcatttgttttatgaataatgagtactcaatttcagaaattcaatatttttttatttcttacgtttgtttttttgctttactatcttgtagcaatggctcaattttaatgtgttgatatccaattcacattctggagttcaacgatacacaaaactaactctatttggacaataaaactagagatgtggagctcacagtcaccattcaaattaaccaaaccatacaaaattaagtgcatgaacttgggaaatccggttttagatatctcacaaactttttaatttttagtttttttataaaaaataatgtttttggcaaaaaaaaatgcaatttgtggtggtttataaaccaccagaaattgaaaacgtgaaaaataaaaaacaaaaataaaattaaattttgtgacgattaaaaattaccacaaattttttggtatatttacctgcgttcctctaaaaatcgtcacaaatttttctaacattgataattctgatagtccatcctaatcatcagaaactaattttatgacaatttttaactgtcaaaaattactttttttaaccgtcataaaaatataatttttttgtagcgatagctacaataagttctcgagcatggcgttaaaccaactcctttgtcgtgtcaagctttcaagccaccgcgaaaggctttgttgccactgcattcgtgaatgacaagtggatgttcaaatctgggttttctcaagtggacactcgtgaatgacatgcatttaaatttgggttttctcaagtgggcgttcttgatttttttttcttttgcatttttgattattgtgcgttgatatctgagtactagtgggtttggcttggttgctgttgttctctggaaaaaaattatattctaaaattatgttgtatgaaacaagtttagatctatgaaaaatattgatcattttatttttattgtgtgtaaaagtattgttgcatgtttatcttgatagaattgttgtatattaataataataactaaagtgaactttttttacaatatttattagataatttagcaggatctgatttaacttgagtaaatataatattaatgattgttgacattcacgcagttcaataattactgtctgtctctgcgacagatcttaatccaaagtttactgccttactggtactatctgactccgcttccatgtcaccagatacgcctaaagttatgactcccaactttgtacgctgtcaacttcacacatatcacgaaccagtatttaaattttcaaagcagttttgataaactcctttttattgactgtttttgttaattattttagctgtgtatttgatttagggaataaaaataaaatgtaaatttttaaattaaaatatatagatttcacataaaaaagtaatttttttatatattattttcatccttcaaaatagacacaacctaaataactagtgttagatctttttatataataaaaattgcattaaaatatgttaaaaattatgataaaatacattgataacattttaattatattttgctcttgtaatttattaatcagaaaccacaggccacaacattcatctttactttagtaacaggcccctaaaatattgaactttgattacagagccgctatgtagcacgagtaccaccgttgaggcagcatgttacccagcaattctctttgctgaatattcgtgctacctataatgattatctacaccaacccatatgcctttggtagtttcgtacccttacagctggcatgtatgcttttaagggaaatgaattctctctattttcttttttcttcatttcttttatttttataactttttagaaaaataaatcaaatgatgcatactttatgagaattcaagatgaagtaacactaattttctcagaaaaattctattcttctgagaaatgttaagaataaatcttctaagatgcctttctaagtaaacattatattagtcaaaattttatgagttttatattttgtttaatgaatctcttttttttaaaaaaaaaattaattaattttgattaataatataaatgtattaaaaaaatactttcaaagagcgtgctttagtaattctcttcttatttataatttttataacttttccttgtattatgaggaatataagaatatattataaaaatgtatttggaagatgtgaaaaaaaaaagaaaatgaaaaagtaaaaaatatatatttcattcatctatttatgtttaaaacattgaagaaaattgaaatttatgtgagatatttttcttcttctcactttccttaaaccaaatatatgaaaaataaaaataattataaaaatacattataacaataaattcattattttttaacctacaccaatgtcatactctattgtcatagaataaaatgttgttgatatgtaggtcaagaattgagaaatctgagcatagaaatccatgtgaagacaaattcaaagtggtttcaaattatcaactagactactacattaaattagcaattggcgcgcacaattctatgtacataacatctacaatttcccatagttttaaaccataagaacgaaaaaggaaaaatatagaaattagaagcatttcatagaacttatttcaacctatacatgttacaaatcactatcactatgatatgatatacaacaaaagcgctatctatcgcccatgaaactcctagtactatacagattacagaagtggccaaaactgaaagaatgatacaatctaagtacatggcagcataacatacactcaacaaccaatcatcacataacatgccatctttcccaggaaaatcaaaattctggcaaatggatcagaattgtcataaaactcatgaccagtttcattgaagtttcttcccttggttctgtgaagtttgccatcaaaggaagccaagttttgttagaaacttccttaccgtgtcttggccccatttcatgtcattttgcaagggattgtcatcatctgtctggtagtttggcctgtcttccatttctggggacaaatgagactcttcacgttcattgtaaagcagctctgactcattattgatggttgcatttatctcttggggtgtggcatcatcagtttcttcctccttactgaactgaacattttcagtttaagcacaacattagagagttatcaaactacttaacagctgaatgatttaaagaatgcaaaatcaccaccaacccactcccattatatggattcaactacaagagtcaaacaatgccataatattctattgtaaatatggacaaaatatgaatttttagacccttttctatgggtttgactataatttttattggtttctcttattagaaaagtgagaaaagatgaaataaatgtggccacacatcatagagcttaaagaagaggagagaagtaccaataaagtaactcattgtatttgattaaaatgtgatagaactggactagaaaagagagaaagaaagaaaatgtagtatttttaagtgtgagtttcccactcctaaaatgagaacaagtgattttcgaggtatcaccaccctctaacagatcctctctccctataccctcactcactctttatactgtcccctaactgctattaaccaatcagttagttaaccatcagttagttatcctgtttcaactaattgacaattgtcttaactaattgacagctactaaggaaacctcctataatacactttttcccatctacatctatcaatatcctctttcaagatggaccttgtccccaagatctagttgaggaaaaacagtctgcatttcatcagcaagggtctccttcatctttttcttccataatcatcaatctgaactgtttattcttacatacatgagcaagattacacttctcttcacaggtgaaacattctcctttcctcatcttctcatttacttccacaggtgacaaattatggaaggttcttccatcttgccatccactggatcctattttagcaacattagtaggatcaattaccttactatttgttggttgtcaatcccttacaaatccctgatccgggttacaaattatggaaggttcttctatcttgccatccactggatcctattttagcaacattagtaggataaactaccttactatttgttggttgtcaatcccttacaaatccctgatccgaataattgggtttttgaaaattataccccttagtattactcatgggtaacttccctaagacttgattcttgtcttccactctacgagccttgaccatagattccatcaagatttttggttcatggagctttacttcagtgttgatctcttcttttagttccttcagaaacacctctaccagaaacaattcctccaaccccttcaccattccaacgtgcttttcgaattggcctgtgaattcttgcattgtttcttgctgttccagcaccagcaatgcctgaaaaggattccctaggttagacgcttaaaacctttgggagattgcaatcttaaacccttcccaagaatggtttgggttccaagattcccaccattggaaccaccctagagcttctccatccatggaaaccattaccgcttccagcttatcctcttctcttacggcttgcaaccgaaaatacctttcgatctttgttaaccagcccattaggtctcctcccttgaatattggcatttcaagagtcctccatcgatttccaccatacgcaacgttccccttatcccttcctatcgaatcgttcgcatgaacgttctattccaatgattgcttctcccaagctgtcgccaaccgctgtatcatcccttctatcgaactcaattgcaactccactgtgtcacgattttcttccatcactttctctatagcttccatgtgtgactccattcttgcattcgccttcaacactattaacggctccacagctcctagatcagagatctgataccagttgatagaactggaccagaaaagagagaaaaaaaaaaaaagaaaatgcagtattatttagtggaagcttccaactcctaaaatgagaacaagtgattttcgaggtatcaccaccttccaacaaaccaacagatcccctctccgtgtaccctcactaattctttatactgccccctaacagctattaaccaaccagttagttatcctaaccatctccactaattgacagctgtctcaaccaactgacagctactaagggaacctcctataatacatttttccccatctacatctatcaaaatgatacacacacattgactgtagataagtgctctatatatgcatttttccccagcgaatattactcttaatatctctctactctagaaattggtatatctgtcttgtccacacatgctcaaactacctaaggcaagtttctatacactgccttaaagaatggaaaaaactgcccatccctatgaagctctacatttatcagaaatttaatgcaaaacaattgtcagatgcttgtagtcaagggtaaggagttattgtatttatataatggggaaactttattggaaatttattgcaaaacactgtcagttgcttgtagtcaagggtaagtaaagaattattgtatttgtataatggggaaacttgtattataagatgtgaatataatttatggcaaagctagatggaatgttggattagtctttctaaccagttccagactctgaataaattttgacaattattggtttctgtaattcaaacaaccaaaaactaattgtaaaatattagacattttaccatataattgtaagagcacttcatcaatggttaagattcatttaattaatggtaacaataaaaatagaaacattttttcttctttcccttagcctttagatgctttcaatatgtatgagaaacaagctgatgcactgtggagatggacagaattcccttcattgataaacatagatgatggtacaaacataacaggatacttctgtttattatttttcacctatcgtcaaacaggatttcaaagttcaaaccctaagctcagaacaacttgttcttcaaaagaaacagaatcaagcaattctctgtcaaaggtagttggggacaactaaagtagggaaaaggttagaagggaaggagaaagggaaggccacactcatcaagtgtttacctcagctatgttctgatccagagtttcaaaagcttcaactgaagtgtccgtgttagccatttcttgaacttcaccatggtctgcttcatcagttggctcatttggtggtattgttaagccaggtacaagaacaggacctccttcaagatcaaataagctgctttccacaattgtcttttcctgattctccattgatgcaacatttccattgtgaccaagatcatgtattatatcatcatttcctggactatctgcaggttcttcacttggttgaagtatactctttttattacttttgttgcttatattgctgatgagatcctctgaagaacttatgttttctgcaacaataaccattggcttttccattgaggaagaaatactattaccagtgatttgttgccggactgtttcagcaagtggttcctccacagcatgaatttgggtatcttctacagccgttatttccaatgctttggaatccagttcttcttgaggattattaagaaattcagctaaagttggcacttcaaagtcaacctggggttcctcatttggctcggcaagttgatcttcctctgttattttctgaagttctacattctcccaatcttcaagaacaactattctattcatagtttcccaagtatagatcaatcgatccgaccctggctgccaaataatatcccccccttctcctttcagtatgaacttaaactggaatggttgtccagcaggcatatcctgattatacaaagaaagcatattcaacatttataaaagtttttaatccaacaatattttcaaattctgaacagattttactcaccagctccacagtccatacatgtccttcagaccatgtcatgggtaatgcctctaaagggtcccatgaaccaagcacaggatcatctccaactataagaaactgttcaccaaaattacaattcttttctaactgaaacgatacacgaacaaactttgattcatctgcacaacaaattacaatgttaggattttgagttccacggcatattatatttagtagaaaaaatacaaaaggtcatcagaacccactcgtttgttcaatttgttgagcctgaggctccacagtttccaagtctacctgcaacattttattcgggccaagagacagtctcatcaaacatgccaaaatcgtgtacgttctcaatttatttaatgtatatacaacaactagacaacgatttcgtaacaaatttccccacataacagaaaagccaattagtttgggaacaaaacttagatgtagttctttaaatactttatgttgttctgcaatcagaatttgattcttttagtgttgttctccaatcagaaatggagtttcaattaggtaatccatgctaatttttaatcaaaaattaataacacgaattattgaggtgaaactccaactccaatcgaaaaacagtactaaaatattaagaaactgcatctaagttttgtctttcatttggcttatatccttttgaattatacaaaatcattgaatctcaagacagtaaagaggctccaccagtaacaccaaagcaacagagaaaacttcaaacccgaaatatgctggaaacaatcgtaccaagctataaaaaacaaaacaaaattgttgtggaagtcgccgaacatttcaagaaataaccattcccataaaagggaaacaaaaaaagaaagtgacaatggaatcagaaccaagaagtctagcatagcagtaatacgaaatgttgtgtagcaatttttggatctacgcacactcatacaaaagggagaatatttagcgtatataaaagaaaccaaaaggtgagaagaaaccggacaagctactaggaaacacgaaatttgagaaaaaggaaagaaaaaaaaagaagaagcatattttgagaacccaacaagaatcacccccacttgaaagcaatcatgttcctaacatgcaaacaagaaacaccccaagaagaccaagaacaaacaaaagaaccatgatagttcaacaaagaaaaacaaaaatttgaaactaagcatagaaagaaagaaagaaaaaaaaaaaaaagaagcaaaccttgtcctttggtggcactgcttgaacagggtaaacaccattgtttcgaaccagtttcaggagcaataaattccatccctttttctcatttttggaacgaagggtgaagcagaattcgggtctatcagaaacacaaagggaaactctgggagagaagggtcctagagtctcgaccatggccttagaacaagagcttgtgagggctttcatcagtggtggagtttggtgtgccacacaacaatgagtttctggggtgagtgtgagacactggtttggtttttagttcccttcttcgatcgcttttgttggatagaggctgagaatcttgaatctatctggtcctggcggtcagggtgagcctgtgagaagtgaggtggggtcgttttatatggtggtggggtttaaagagtttgtgtatttattatttgttcatttattgttttattattgtggtgctaaaggaagaaaaggaaaaaaaaaagggggggggagaaattgatccacgtgtatgtgtcatgtggacaggaagtggcatcactggaattcctagttcacgtttttttaagtgaaatactagtgctatattttttatttttctaaatatattaacattttagttttatgaaaatttaatacatatttattttatattttagtgaaagagaaaatacactatgcacgataaatgtaaaatatttttatattattatttatcacactttataataatatattttacaaattttttaacttttaaaataaatatcttaaaaatcatatatactcgtaattttttattagctgacatgtaaatactacataatcattaaattctcaataaaaatgttattggcttctcataagaaattaaaatcatgtaatttttatataaaaaaaataaaactatatttagagaaattttggggaaataaaaatatattttacatcatttttacactattattttttgataaaaaaaatggaaataaactgagattgatcttttgacttttttaacataaaagataagtatgatataaaaaaatgacaagtttaaaaaatcatactgactcagaaaataaaaggaacatggttttgttaggcaaaaaagccaattaaatacaaattaaataaaaaaaattacgtatttggtgtcgtttcaaaactatttacgcatctggggcaactggtcacgcccagaaccaggcgtgactcgggggtagtcacgcctggttctgggcgtgaccagtcatgttcagttctgggcgtgaccagtgtgtatatatacccccaggactgcactgttcactcacttctcaacttttggcttctctctaaaagcttctctctgccttctctcttaaaagttctctgacttctttctagaagtgctctgggttctctttaaaagttcagaggcatcagctttcttcggttttcagcaacgaagctctgcgaacaagtaagttaatttgttttttaattctgaatgatatttaatttattattttgttgatttaagttagttaatttattgattattagttatatttagcacatgatttattttatgttgtagaaaactgttagatggtaagtgatatgatttgcactagtttagggttatgatttagtattaagttaagggttagattttatggttaagatattgatttagtgttaggtttagagttagattttaatcccttaaccctaaaccctaaccctaaccctaaaccctagccctgaaccctaaaaccataaatgatgaatactaaccctaaccctaaccctaaaccctaaccataaccctagccctgaaccctaaaaccataaacaatgaatactaaccctaaaccctaaccctaaccctaacactaaaccctaaccctaaatggtacctttatttgatcctgaagtagattgtcattaaattttaataattttaggattagaagattatagaaaatcggtaaccctagggaatagtgtttagaatggtttagaaagcggcttcatttggtgtgcatatcaggaatctccgagtctttagaattgcaatgaaaatggcatgtgggtatgggataatcccaattttgatggtgaattagaaccctttggttgctgctcgagagtctcagagttggtgggtaaggagtgtatacaacagtactccccaaattgtgttgttatgcaattccgaatagatcaggacattccttgtatgctagcacaatacaatgagaatccttggataagttatagtcagccagtgatggatacaaatttgtatccattactgactaactataacttatccaaggattctcattgtaatgtgctagcataccaggaatatcgtgatccattcgaaattgcataagaacatgatgtgacgagtactgttgtatacactccatacccaccaactctgagactctcaagcagcgaccaaagggttctaattcatcatcaaaattgggattatcccatacccacatgtcattttcattgcaattctaaagactcggagatttctgatatgcacaccaaatgaagccgctttctaaaccattctaaacactattccctagggttaccgattttctataatcttctaatcctaaaattattaaaatttaatgacaatctacttcaagatcaatttaaatataatttgtaagtgttattctaaaccattctaaacattattccctagggttaacgatacatcacgaagatggctgcgaagatggatcgtagtgtaagtgttatttaaatataatttgtaaattaattttcattatgatgttgttattgtctagactaatcaatttcttgtgtaatttgtagcttgatggactggagatgatgtattgtgctagtggcaggcaggagtggcctgggttcagcatggactacttgcacgaggagattggtcgcattatgtcaatgtttcggcagagctgtaggttggaggagccaggcccagctgcacccccatcacagcttccagctgaagatgatccgtatgtggatgtttctcgtagcggtcgtgagggacacggactggagcgtcaccggaaagtaaggcgacaagttcctgagatcatacccgctcccaggcctcgcgctgaaggtacctataggactccagtgatagcacccacgtacggcagccagactttctattaccagtcttcgcagcagtcggatatgggctatcaggggttcagtacgcagagcgacatgccaccactgccagagtacaagtcacagcatgtctattacgccccaactttggccacggctccactggattgtgggactagttctggcattcctgcttcagagtggactgatgaggacatttagaggctggttgattttagtctggatagtcatggagattggtcagcacatggggaatacgacaccccaatccctgaccatcctgacccagaatcacaagatccgatgactgcatgcccaccagtatatgcagcccatcctcagccagccccctccgatgcagggccttcccaggcagccccttctcagtcatcacatcatcaggctgtgcatcctcagccaggatcttcgcagcgacgtgttagacgggtgaatcccgatcgtctagcgcgtcatcatcagtggccacctgagtcatagggtttatatgtatttacatttgtgtttatttatttgttgtttcttgtaatgtactgtatttgtgatggatatatttattttttggtgttatgaactatatttttttttgttatgaactttatgcactttatgcaccaatttgtttttggttaacttcaaatgtagtataaggaccgtcattagagattgaacacgcccaacaaatggaggcgtgactgcacacgctcaaatagggcatgaccggacatgcccaacagatggaggcgtcactgaagacgcccaacttaggcgtcacagaaaagggggtcacacctacagttaggcgtcattgaaccttatataaggcttaccatccaacacaaattgcatcgactactccctcaatctaaatacttgcctccgtaactgtaagattgttttgctatggcattcttagcagaaacaagcagccaaaccattgataactcaagattagccttcatttatccaaatggatcgatgaaacacaacgaaagcggtgtttcttttgaatgtccctctccaataccaatgcgggttcccgatcagtgttcttttgaaacactgaagcgtaggatgagcgacacccttatgataagcgacgaccagtttgttgatgaaatctactacagacagccaaatctacatcaaggtgaccaatgtttttttcattcttttcaacttacaaatgataacgatgtctgcataatgttgatgtgcaatgaacaactgtcgagcattgggcctatagaaatattatgcaccataagaagaatgcctgagggtatactcaacctgcttcaatccaccatggtcccaacacatgatgcaatgctatattacaacgacaagtggaacataccacgacaaggcggttttgtgggctatgcattcacgggaacaaatccaatcagatttgacattccttctgtaatgccccagctacaaccgggggtcattacccagccttaattactatcaataacaacaatcatcagagttaagcagttcggaagcataagaaagaggatgacatcatcagatgtcactatcatagcctttatacgtcaaaatatggtgaatatacataacaattgtgtcttatacaaaactgtacatataacaatcccctcagggtacaaaacaaaaccaaaggcgaatacaaaacatcagagccacatgctcatatcatctagcatctagcctaaggtttgcacatcacagctatccctacataggcttcttgccttgggatctgtctgctcctcctgaggattcacctgcaaaacataagccccacacacggggtgagatataaaatctcagtaaactcaggcccttgaaggtatttccttcccctggttcacttccaaacataaacatagaaatagtatatccaagacattcattctcagattcaacactggaatctcaaccataccatcaatcctcagaaatctcaattctcattcacctggccacaaccaggtgcctcaaacacggcccacaatcattcatagcataaatcactacctgaccacgatcaagctatactcatggcataccgccattcatcacatccaaccctatcctgcagaggctacgtctagatatataggaacatctcatctcaggaggctacatctatatactaggaacatctcatgccagggttcaatcatctacataaggctacatctgtatatatagggacatctccactttaggaggctacatctatataacaggaacatctcatgtgtctagcggaggcttcatctgtatatatataggaacatctcaatcaagaggctacatctatatataacatgcacatctccttctaacgaggctacatctgtgtatataggaacatctctgttcaagaggctacatctatatcacaggaacatctcgtaacctatctcaacacaattacctgaggaggctacatctgtgcatataggaacatctccgttcgggaggctacatctatatcacaggaacatctcactgcaggtcttactcaatctcaagtcgtctatcctactaccataggattatatccattcaattctagaattcacattcagtctaataatcaatcacgcatgtcacaggctgaatagctcataatcatatcaatcaatctcatatcacgggattcgaatttcatcacaagcatctcaagcatatacattcaatacatatcatttcctcatcaaagggtccagcttgcatctcaagcgtactaagccaatacataccatacatatcattccctcatcaaagggttcagcttacatctcaagcatacacattcaatacatatcattccctcatcaaagggttcaattcacatttacattcatgttctacatacacacaataaatcacatcaaaaccattcctccatttggagcatggtggaacacagcaaaggacatacgatcaaggaccaagagcttacctgctctaagcaaaacaccggcttccccggtaccgtggctaccaccaccagagatatcgagctcacgtcctacacaagtaaacacatagcgtataagcaacggtcctaagccgttagatcgaaaggaattacaatccctttctacagaatctataactgatcactttacaagcgattctcggaccctcactaggatccctctctgcctaaccaaggctctagagtctctcctaagactctgcttaggctaacacaaagcacatccatgccttagccttgtcatatccaagctcatagtacaactcaatatcatcccaagagcactgcatcatctactctagggttcaacataaccatgcactcagccctttctctatgcatgagtaactcagagccaaaatcaaacttcatcaataatgatttctgaaggctctaacatcatccccacaaccccctgaacataatcctctacaggaccctaggctaattctaaccccatcacatatgggtcactgttcatgcaaacccccaatctcaaaatcaaacggagaaacttgagtttcttacctcaacggcgtcaaggaagaccctaggaccacctcctcgagctctggtgtccttcccacgcattgggtctcagccactctcaagttctctgagcttttccttggggattccaaaattcactcaaaaggggtttttgaagagaaaggatgagtgattcaagcttccaatgtgtttctctcactagaataagccataagaaggtgttttgatcaagatctatggctctaggaagctcaagggtgccaacaatggaggtctagggcataaatggggaagaagagccttttctctcttcttttcgcgtccagaacgagctatataaaaactgatttacaagtcccgcgcggatcgcgccgttctccacgctgatcgcgcgagctggacgaaagcatagcccagatttaacctcccgtgcagaccgcgccaaaccccatgcggatcacgccatctattcgaacatcccacgtagtagcgccatgcccacgtaaatcatgccatccattcgaatccacagcccagatttgggctcccgcgcgtaccgcgccataaccgcgctgaccgcgccacaggttcgaaccatccacgctggtcgcgccagatccacgcggttcgcgccagctgttcgaacccattactctgattctacatcccgcgctgatcgcgtcgtcaccacgtggatcgagccatctcttcgaccttaccacgctaatcgcgccaaccccgcgcggatcgctcgaactggtcgacacagccacatgctttccttaagctttcctctaatcaaagctaatctcgaggcttaaactcatgcttaaaactcaaggtattacaccttcaggctgcaacattgaaacattgaagtatctaatcaagcaagttgcgcctgttggacttccccctaatggaatccacaggtcacaggtggttacaaaaaaaaattttagacagccacagcatcacgcttattcagaaaacacaatcgagtatcacatcaaagggttgcagtgcgatgaagacatgttgaaggtgttagctgaatccatctactggaaacgtttttctccgatacaaatcttagctgtttttagccaacccgtacccgaattggaataacgcatatgttacaccagacatgtgaaactatgaatttgtgttgttattttcttaattaacgttgttgttttcttaattaatgttaaccgtgttttgtaatcattatgttatgcgaattaatgaagatgatgaaatggtaaacatagtctgaaacataatgtcatcccctaaaatacaaaacattttaacacaggtaatgttacaaactattttaaattaactactgaaatcatgaaacaccaggacgatgaggacaagctctccgattatgtccaacagccttgcaaattccgcatctggtgcgtctttgactggtttcgacttcgtccatttcgttgcgaattctggtcgcctttggacaaccctttccacgcaacatttgtctgttgggtatgataaccggactgtcagtcggtggaatggcaccttcatgaccaattggctgccatgggattgaataagcctgcaccaaattacttatgaggaacacatcgtcaacatactgaaaaggattctgccgaacatgtaaagcagttgctgtggcgtgactgcatggatatctgaaggccttaaacttgccacattgacaaaaccgctgcccaaggttgactgaatatgacctctcacagccatcctccacctcaaattgtgttcgctcaagattataagtgcgtacgtggtggcctgtagctacggtctggttatacctcatagcatcaaccacatttctgcaatgccgcgtcgaagcctcaacttgtgaaatagccgcctgacccctcgttacaaaatattcaaccaatctgttgtacgtgtgtttcaccaaagcagttataggcatgttcctagctcccttcaacacccggttgactgattcaaacaagtttgtcgtcaaatggccaaatctcctcccctctacatcatatgcaagtgtccactgttccttggggatgctatcaatccattctgcaacctcagggctgctatcacgaaatcgttctaacgccacctcaaaatcaactatacagggattataacctgcaaaacaatcatccaattaacactaatctacttacgatatgaaacattttaatatcgtgtcataattgttaaccatacctaaattcatcaggttcttcttcaagcgttgatttctgaacttttgattaaaattactggcaatatgacagaggcaaaacatgtgatgagcatgagggggttgccaaccagcatgattcgccacaacaaatagtatgctgcggtgcctatctaaaatgagacaaatgttttgcctctgagtaacgtgaaaacgtatgttagccagaaagtatgaccaagcttctaaggtctccctctcgactatggcaaatgccagtggcaggcattcgttgttgccatcctgggttgtggcaatcaacaatttccccgtatacttcccatacaaatgagtgccatcaatctgaatcattggtttgcagaaattaaatgcctggcaacactgtccaaacgtccagaacatgcgatgaaacacacgctttcctcgtaccagtcgatttgccacaaaataatcattggtttgaatatcataaaaagcacctggtgaaaaatgaagcatatagccacaccacctgggcaaaaatgcatatgattcttcccaattcccgtaaatcattgccattgctttctgcttcgcgaaccaggccttacgatattatgaaactctgaatccaaatgtataggtgatcctttcccgaaccaatgaaatcgacacagatggttcctccttgatcattcctaacaatgcaaaagtaacattcacattaaatttaaccattattcaacacatacaaaggaaattttaaacacacgtacctactacaattgaggcaataacatcagcatcaagctgtctatgaccctgtgaaatatggtcgttaaggcagttgtgattgccgccccatctcgaaacaatccacttctcaccgaatgccggtttagttaccctaaccctccaagggcaaccctctttatgagcaatacacttcatgctaaacttgttaggcttgctctcaaccacataagcctcttgatgctccttcatcaggttccgcttacatgcgatctgtgcatccttttttgaggaaaattcttgtttaacaaacaacggatcccctaattgccatggaccctgcactgaaccggaaccagaaccggtaaacgattcttcttcgcttgatgacttcaatcaatatatgtgtagtgaggaattccatcccaaaaaggagtcacctcagcaccttcaaaaacaaatgtggtagaataaatatagcatgcacacaaatatgcaaagtgtacatgacttaataattaattttactaatgttacataccttcaacaggatgttctggttgtgaacatcctacgtcaggatgatgatgcattccagacgaccccacatcagtgtatgcttggaatccagtcgcatcaacaccaacatcgtcatcattatccgacgcactagcatcctcttcaagaagacgatcctccattgcaatattttcatcatcgtcatcctcttcatcgtcatccataacccaaattgggtcatgtgaatcttcttcagacacgttcacaactggatcagcatatgacgatgtaggttttgcagcatttacaggaactgacataatgggtaacacagcagccaccacaccaaagtccacgtatagctctataaaatctctccttgccaatttaaaaaattcttgaattagcaattgtaggtcttcatcgtccacaacttgaaaacccatgtaatgttcacgttgccataatctccctgtaatttgtaagatactttggttgtcttgcagagctaatttttgtcgaatcttctgatgtaaatcacccattgtcgagctccgcttcacaagtgtctgacgtttctccccttcaaaaacaacaccttctctcccttcaaatatccttccactataatataacacaacacgcacaaactcgtcaccacctgaactcatttcttccactcaacaaaaacaaacacttcttcctagagcttcgctgtacacataaatttcaaaaaactgtgttagaatatcttcttaaaccttaaaccctagctctaaggcgtataaatcctaattcctaaaccttaaaccctaaaccctaaacattaaaccctaaaccataaaccctacaccctaatccataaaccctagtccattaaccctaatatgtgaaccctaatctgtcaaccctaacccctacactccaaacactaaacagcatgaagatgacctaaacgtgtacactaaaccctaaccagtctaccctaacctaaactaagctatacaccataagaaacattttcgacaacactaaaccctaaacactgacaatttcataatacaatatagtaactaatatacacaattaataaaataacttacttgttggcagagcttcgctgcaaaatcactcacactacacttctgcaactcgattcaacaatgcgcaacacagagcaatgagggaaaactagaaacggggggcatatatacacactggtcacgcccaaaactaggcatgactggtcacgcccagaaccaggcgtgactacccccctagtcacgcctggttctgggcgtgaccagtcatgcccagttctgggagtgaccagttgccctagatgcataaatagtttcgaaacggcaccaaatgcgtaattttttatttaatttgtatttaattggtttttttgccggttttgttataagtatatattcaaaatagtaacaactttacacgagtctgagtccttgtttgacatgaatatgtagaagtttaattaatttgacgagggaattgtagtgaaagactaaaatgaccacatcaaagaacaactgtcaaaaattttagatgaggttaatgaaataattttcattttacattactttattatttagattgaagataaaaataatagaatataataaataatagataatagataacagttcaaatatatgcaaaggtgaaccattttttccttagattctgcaatagtttagtgtttattttgttgcgtaaatgacatcaaatatacataatggactggcataacacttgctaatcctgcatttattctcaacaaattgaacttttattgatccaaagttaatcattttcccaatacccctcaaggctcaagtttgtccacaactttttcttcgacattaaccttataacggtaacgtttaacacaaaacaagatatagacaagattaatcgaagctaacccaggtatgaggaagtaatagtagtccaatcttccagcattgatgtcatcattcaaccaatcaattccaccatgctttcgagtcacttggtgcacaacattaaccatcaaggttccaacataaatagaaaatgccaccacaagatattgcaaagagtttcctatgcttttcattttatctggtgactcagtgctgtagaactgaatgtgtccaacaagtgtaaacatctcacacaatcccaaaaacacaaattgtggtgccagccacattgcattcatgagtgcaccatgtgaaatagccacaccccttctttgccactccaccaagccagcacttagcattgtgagaattgaacacacatcaccaatcactatcttctgaagacttgtgaggccttcatctttttttatcacttttgccaatgctggctgcaggaagaggtcaaagcatgggaggaacatgcctatggtgattagagacaccacgttgtacgatgcagccggaagctcgaagtgccgtccaatgtgcctgtccattttcaaggcctgagatacagggaaggtgccttgttgtgctatgggaatcaagcagagaatgcctgaagcccagattggaagcattttgatcaaacatttgacttcttccacttgctgaatgttgcaaatcctccagggattcttgacacaatcttctgtgttgagatcgttgtcttgtatcagggcagctttgtttaaacacctgtgcaaaaatcaaatagcttcttgattacagttactaataagttaatttgtctttaaacgagaaattattgcatggttcagaattattatagtctcaactagtctctacatgatgacaaatagttgagtgttacaactgattaaattttgtgttgtttgcactactcatgcattccaccttgtaaatggtaaaaaaaggaaggtgaagaaacttttttttttcttctttatctatcatgaaaggtaggatttgattcttatgaagtgaataatgcactttaaaaagataaagtacataaactcagtcattaataagaaaaccaattgtcatgtatatgcaaaacaattcatagtcattttgaataataattattaatttgttggtaataactcaaatttaggatatattagatagtcctagactatcacctatctattattccgaccaatatttatataacacatatttttaagttttttatttataaaaaataattaataacacttgtttgtgtatcacaaagagattggtcagatgatgatgttaaaccatctcataatttctctaaatttacatttcatcttgttttaagaatcaaatccttaaaagataagatgtgagggtattataaaaattcaagggtaaatattgaggcgcattacctaagttgtttggtcaaacgtaacttcagtggtgctttgtcatccactaggggatcaaagtaaacaccttcttctttcaccggaattttgaggtgatgcttcttataagcggcaacaaacacctgtgcaatgccagaaaatatgctcccctctgctggaatgtagacataaatacatactccagcaaaatatatgataattgaacagatcatgagcacacttagtgtgccaaaacccaagatccagttcttgttttggaggtaaactattgctgtcaaactgatcaactggaccactgtctgtgaagtgtagtaccaattaaagaagctgttcactccttttcttccttcaggggaagttgtgtcaaactgatcgatggcaaagggaatagtgcatggtccaatcccacctgtgcccacagccagccagcacaggcctaaaattaagatgccaagttgagtacttgttgggggaatgcattgctggggagaagtgcaacttgggggatgaagttgtggcatccaggctgttagtgttagaatcaccattccctaattaatcaccaacaaagcaaatggttaattgacactaacacagaatcaataagattgtaacaagcatagaatgtaatttaagtcctttaatatgtggtcaaaattgattatattccatatgttttaaaaatgatagtttttatccttatattttgaaagaaaaaaaaaatacttgaacaacccaaaaactatccaacaccaagtgtgagagagaaaaagagaaaaaaaatataaatacgatgtaatatgaacaatgtaataaatagaaataaaagatattaaacaaggtgtttcaaataataaaatatctaaatatttaagatattgtcagggttcttatattttagatattgtctgcatagtcgtaggttgtagttttgttcttgtaaaaaatattagattgagaggagagtgtttatcaaagtcgtgtgattttgactctatgggggattttgtgattatcccaacattaactaactaatttcttttattagtgggaaagcatattaactaactaattaatcacgtgtttatgtcccccttcaaattgctttggcgtgaattgtaaagcatctttaatgcataatatactctatatccttttgcaaatgcatcggaacagtaacacactaacacaaacataggcagctgtctgaaggagaaagttccaaatatttaacaaagaagaaaaatattccttagaaaataaaaaacttttaaccgacaattgtaattttggttaattaaattatgaatttgtaagatgacggatgaaatcacggtggctaaagttataatgccccaattcagtgacaaactaaatttaatcttaactactaactactaagagatccaaattaaattgacgaaaggtaaatgagtttctctatgaacagttatacggtgtctaacgataatggaggaaaacataccacaagtgtcccaaatgatgaaatagcaatggttctgaattttcccagataagcatcagcaacacaggcaccaataattggtacgaaattgctcactccagtccatatgctaagaacatttgaagcatcaacctgacccaggttgaagacttgcaacaaatacaccatgaaatttgccatcatgcccactgttgcaatcctctcaattatttgatttcctgcaaatcaccattaaaaaaacttaattagttaatttgatcataacaaatggcacatctttaatgaattaatggtatgcatgcacattttttgttcagacagatagacctaagatgtaagaaatggccttccatccgggcctgttttccattgctattggaatttgaggaatctaaaccttcttcttaagtggctttcttgatttccaattcctgtaacaagtggaccagaaagatcttgtgtcttttcttttattctctatctccattaatttcaaccaaagtatgtgctttgtatatttattgaatttgtgtattttaattaaattcaaatagttattagtaaacagaaatgatggtcagcagttctttttcattattagtgtattttaattaaattcaaataattatttttatttttcaattttaatgattttccttaaatataattaattatttacttaaaatagggattagcgaaagtacccaggcagtgaggcagaacttaagcagtgggtcgtctcaaagactgaaaacaagcattaaaagtcagcaatcaaataaaggaaaatagataattaaataatatttcttgtacgtagttttgaattcgaacctgaaaatacaagggttgcaagtagtagctagtatgcctaaagtcaaatcctatagttactaaagcaataacgcttatagtgtgagcttgtatatagcagttacgttgaatgtaacgttaatccagcatcatcattcctttttatgtttttgcatcagaaatatggaaaatgttcattcaacaccatttcaacataacagatttccaaacttaatgtttctataaggctttggtgagcttcacctactgttatgtaggctttggttcaaagcacaacatatggggaaggtagagctctaatataacaaacaatataaaaaaagaaaaaaaaattgatttctggtacatgaactttttgtttggtacaaaagaaaaaatgatttgacaagaagtgataattaaaaatgtatcctgtaatattatttgagttctcaaattaatattttattaatcaattatctaattaaattaaattttaagtttttttatcaacacataaaaatgtatttattttttgaggaaaaatgtattttataaacattaagcatagtgaaatattcgtaaattaccgttaaaaatattatattaattaaaatggtttaattttgaaattttcttaaaattaaaagtttaaaaatttggtatatttatttttatatatttttgtatcatcaataatttttttaaagtaattccaaatttatatatttgtttttatcacatttttctatatctataaattctttgtgatttgatacaataaaagttatttcatacaaattgtattatatgagaatacatatttttttgttagctaatgtacaacacaatattctcatctttctctttttaacttaaaattattatacactatcaataattcaatatatagacattaaacttttttataattgagtctctctttatatagaaaagaaagatcaaaataaggtttttgtgaacatggttaaaaaaatgagggttttatctttgaagagtattaattgattctaactccaccataaacataatgaatgaaagtttaaatattaattttaagaaatgtatcaaatatttattgtatttaaataattcatataattttataaagatattaaatgcattttagttcaaaccaatgaatcagaaaaacctttgaaaaaaatatataataaaatgcattaaaaattagaaattacagaatgttaatctacacatctttatatagaaaaaattccaatgctttaggaatatgtattttttacattaaaattatgatacatggtatgtgtagttttttgttttcttatttttcttttgtgtaaaaataagaaaattattagattaaaaatactaattgccaaaggagtttttttcttctgcataattcatttttctggtttagtcaaaatctgttagtgcatattctgttgtgtttttttattgccgtttgattttgtttggtcatagagcttgaagagatgatgaacttgatgaagaaaagctaaacttgattcttagagaaaatatttcttattaagtttggcttgattaggcttatcttgactctttgctagaaatgattttattgcattttttataagactattgcttataaaataattgatgtataagattattgcttagaaatgaataatttgggatcataaatcattttggaaacgcttgcaaacagaacttcataattaagacaaccaacgtatcaatagacgtcacaataagattctctacatgcacaagtagtgagaaattaaagtagtgggatttcttactgtttcattactgcgtataatatcaatattgatgacagagaaatctcagctaccaagatattaaatagtataatatcaatattgatgtcagataaatctcagctaccaagatattaaataatattatacaatagtgttgataataggatgggtaaatagttattttcatctttaaatgcgtattatattgtactgacaaatctgtttctaaaagattaaaattcaaattttaattctcaaaaatgtaaaaagtgtaacaaattcatcattcaattaactttcgtccgttactattaagaaaagagtctacgtgacacagatggacaaaaatgttataaaaatgattgtcaagatgattattgaatagattttggacgaaaatcttagtaagttatcattagacaaaaatgtcatgtcagtaagttaccattggacgaaaatgtcagtaattttctattggactaaaatgtcagtaattttctattagaccaaaatatcagtaagttattatttgaccaaaattaagttactattagaccaaaatgtcagtaatttttcattggaccataatgtcaataacttttatttggaccaaaatgtcaatacatttccattggaccaaaatgtcactaagtaaccacttgcactgttgttaaattggcgagttgactcggtaaactcgtccgagtcaatgtttctgcacactaaatcgagttgactcgatagtgaactcggaaatgggtgtaaactcggtaaactcgcgagtcaattcagtaaactcagttgaatagtcgagttgactcagtggatattaaaaaaaaaaaataaagtttcaaaaatcaaaacccatttcttatgcgatccctttcgttctccttagtccttccgttctccttccgccgtggcacagccacctccgattcagtcttcgtcttccttcccactcgtcgtcgtcgagcacttgtgctccatctccggtcttctctggttctccctcggtcccttcccttcctctgtgtgtttgctagttctgtttgtgattgctaattgctactgtgttgtgagttttctccctcagttcctccctgctccctgtgttgatttttctctcgcggttcctccctgtgtgtttgtgtttggtagtgtgtttaattgtttatttttatttttttatatgaagtagactcttatatacgatttacgtttctacgattttacgatttagctcatcccaccgagtctacttagactctacgatttaacaacattgaccatttgaccaaaatatcaataatttttcattggatcaaaatgtcattttttgttggaccaaaatgctagtacatttctattggactaatttgtcataccccaaatttcgttttatttaagggtaaaatataatttaaggttaaatcttccctcatttttttatcgttgcaagcataataataacattacaataatcacttaacaataggaaaacaaacataagttaaaagaaaaataataataaccataatattgattaacaaccatagtttgttggtcacaataaaacaatatccaaaataaacattcaaacacaattatgacaaattattatgattattaatcaatatattatggttattattatgtttcttttaacttatgtttgttttcctattttttttaagtgattattgtaatgttattattatgcttgcaaccataaaaaaaaaggagggaatatttacacttaaaatatattttacccttaaatgaaacaaaatttagagtatgacaaattagtccaatgaaacgtagtgacatttggtccaacaaaaaattactaacattttaatccaatgaaaaattattaacattttggtcaaatggttacttaatgacattttggtccaatgaaattgtactgacattttggttcaaaaaaaagttactgatattttggtccaaggaaaaatttctgacattttggtccaatagtaacttaataacattttggtcaaattcactaacattttcatccaatggtaactcactgatattttagttcaaaatttatttagcagccatattggtaatcatttttgtgatatttttgtttctctgtgtcatgtagactctttcattaactgtaataaataaaagttaatggaatgatgaatttgtcacactttttacatttttttgggactaaaatttgaattttcatatttaaaaaaataaatatatcaacttcttatacattcaaaaataaaaatgactatttatcctaataaaaacgttctaacttctaagtcgcaccacgatttcataaagctttggtcaacgggtgtaccttagactttgtttgggagttagaagggaaagggaaggaaagagattcaaggggaaggaaagggaggaaaatgagggaagtttatttctccttgtttgggagttaaaaatatattaagagagagagaaatagagagttaataagatatttttacaatttttttcttatttcaaaaattaatacactctatattttacactgactgagataagatagtaattttattaacactgactggagtaagatagtaattttagttacttttccttctaaaaaccttcaaataggaggaataacaattttaagactttggagaatttcagaggagttttaaaaattctcaaatcttttccctcaaaaattaaaactcccaaacaaggagatgtttctatctaaacctttccctttcttcccttcccctccaaaatccatctcccaaacaaagccttaaagtataaaaacatcactaataataaagtcggaggaatataacccatcaattttgaattattaattaacataatttaaaaatgatttggtagatgtcattaaccttttctttttttggtaaatattgctattagcttcatgcatgatatttaagtgatctcaagcagagagtaagtaaataatgcatgaatttacacggtcaattaataaaaaaaatatcatgtttagtaattttataacttagcttcaggaattaaaagttgattatgagaatgtatcattttcatcataagtttaaaatattattctcgaatgctgttgattcccggaaaagttttaatttccattttttccatgattttctacacttttattgtcatgaagaggaattaaaaaaattcatattcccatgaaaataaggaaagttagaaaaggacactaacttccttctttttttacttaaattattttgaattttaaaatatattttcgataattttaaaatataatcaacacatttgtaaatagattaaattgtaattttgatttctttataattttaaatctataattttcatcctcctatttctaaatcaagagtcctcctaatacactttttatttagtttagttaaatatattaatattagtttctatgtatcattagttaagaattattattatttttaaaaaaatatatcaaatttataaataaataaatcttttttaattttattttatatcattttatatgttttttattttaaatagtctacatatttttatttttatttaccaatttataattaaatttcataaatatgtaaatcatttacataaacttttttgtaaattgattttaatatacaaattaatttaactctaattatttacataaaattaaaaatatttgtatattaaatatattttaatttataaattttgatattttttttaaaaaacttttaattaatgatacataaaaaataatattaatgtagctagctaaacaaaacaagtgtcttggtagtttttgttttgtcttatgtataaagggtgatcaagtcaatttctattaaaacactttttaatttttatttcatttaatatttttaacataaatgttatttcatcccactaacttaaggatcaaaattatttattttaaaaaatagaaagattaaatgtcttaattttaaaatatgaaaactaaaattacgaatttaaaattatagaagattaaaattataatttaaccttttaaatatacaccagaatagtcatcatattctcaagaatgtgattcttaaaaatataacataatatcttaagtcatttgtcttttgtagacaacaatgttcatatacgaagcaaatttaaatatataaatgggatcttcactttatcgagctgttaactaaccacttgcaaatatttaattttgtagttttcatgcttgagatggtttatccttgatgtgagaaaagtgtattaaagatccaacatcaattaataatataatcaaattaaaatatatataaaaaaatttatcttatcagccaactttataagattataggtcctaaccaaattctaagaatgacatttgctctaatgtagcgttaagcgtttggtacgtaaaaacaaccaccagataataaaattatattatattcaataaataaaaaatgatttctgaatacaaaaaatattctgaaaattttaatctgtaaataagtggaaataaaactctatgtttcatggataagaacaaaacattctccttgttgggccaaattatcgactgggataatttttttaaaattttatcatttgagtgtagattttaaattaatactcatttagagataaagtcataataaatattatgatttctgaattaaaagtaaaacatctgttatgatttttatttaaaaaaaattatgacttcaattttttaaaatacgactttaaagtcataaattacaattttaaagttgtaaagtattattttttttgtttttcaattcaaatcgtaaattagtttacgacttcaagttttttatcgtaaatcatttttattttaattatttaaagaattaatgtatgtttaattttctgttttatttagtattttatatattattttatttaatatattcaatttttatatgattttatttaatattttttaatattattttatttaatatagttttaatatttaatattttctatatttttttactattgtcaaggattattatttgtattgtaaattacaaaataatacaaaagacctaaatttaaataaaaatataaaaatgtactatatattcatttaacaaaagtattaatagcgggattatgtctcacaacgagttattctgaatatgtgtcaagatctttcattttgttgtattagatttgttggtgatcgttgtcatcttgttctacaacatctccttcctcttgctctaggatgatcatgcgtaattatttgttgttgttgaagaatattatcaccaccatgatcataatctattgttagtattattgttatcaccatcttcctctttatcctcatgattcatgtcatgcaagtagataatcatgaatgggatttttgttaaactaatatgtagtatgttttaatatttttatttaaatttaagtcttttccgttatttttataatttataaaataaattataaaaattaccaatagtaaaaaaaatatagaaaatattaaatatacaaactatattaaataaaaccatatcaaaaaatagaaaatatgaaataaaaaattaaacatatatcaattgtttaaataattagaataaataaattatttataatttaaaaattaaattaaattcataaactaatttactgcttcaatataaaaaaaagacttacaactttgaagttgtattttaaaaaaataatatgaagttgtaaaattttatacaagtttaatgttttttataaatataaaaatcataacaaatgttataactttcaattcaaaactagtaacacatgctacaatttatcttcaaataactattaatttacaatttaacccatgttaaattttagaaaaaattatccaaatcggtactttgttctcctagttgcctataactgaactttcccatcataattgaccgtaaacatattactcacaagaaagtttaaataataaataataattaaatattttttataatttttttcaaaaaaaatattcctaaaagttacattcaaggacgagactccgaggcattgttgctccgtcaaggacggacaaagcaatttgaagggccccactccaacaacaaaaccatccttcgtttagttatgtgcaagtataattaattgtaacacaagtaacattatcaacggggcaccatatttacattatctgaatcatgacacgaagcattgtgagtatttgatatttgacctcagcaagattcttgtatatcactctatgacaaattgacatgccatatgttatatatagatacaaaaataacaatatcctcatgtatcattttatataaactttgacttagtaattttaaatgaaatttattggagtaattggagtataccatatgaaaaacaacgtggaaaccaatccagggccatatgttctgcataagttcttaccaattgcaactctcaccagacacaataatctaaaagatgtttgttcatcggctgcttaaacatgccaagttgtctgtcttccctctaatcactttctctgccataatttttcttatcaatgcggatagtattatctaccatgtttccttacactcagcagctaatacagaagctccagagaagttggaagttcacaatcacagaacaaaaactatggaattaggtcaacacttgttcgcatacctttacattccactcaagagaaggatgaagccgatagtccaaacaagaaggctctagtcaccccattaaatgtcacagaagaagacagaaaaacatggtttcaagaacagttgcataacttcaagatcctcaagtcaaacaacttgacacgacaatttcatgagttatgggatttttcggccgcggatgcgaggctcggtttttcatgacttggacttcccctgcaagtttatttggagggagagtattgctgtatgtggaaagcattttcaagaaccatcctaaggcaagtccgataattctatcaagaactttggacaccaaacatggctacaggatcctgaaaccactgcttgatcgtgggttcaaagtgcaggcaatggccccggacttgccatttttggtcaagactcaagaggactccagtcgaagcttggtttcgtgagctaaggaagggtagaaaggaccctggtgagattcctttgtctcagaatctatagttctaaaatcattaacagggttagagaattctattggagcgcagagcatgaattcaggtaagattcctttgtctcagattactgtgtcatttgcaaccatactcttcttagttaatagtggttgaaatgaaaaaggtggagagttcatcaatcaggggagccatgttaacctgttgaagagtaagactatcaagagaagaaatttcttttgcatacctattttttattcttcccactgtacagggaacactctagtcaaacacaaataaatcggtgagtaaaggaactcgttccagtcttccatgataatgattttctaccttatcaataaaaacagcttaaaatcctattctgactgcaatttccatcaatttttgtaactgaaatgctactgcaaccaccctgcatatgaaatttaaaaccacatagcaatctaaaccttaggtagcatttatcagaatctaaaatttccacattttttacaaaattaatcctggcaatctcctgaaaacttttttctagtcagtttggctaactttggcatttacaatctaaatgccaaaatctccaacaatacatatccaccatttgaggctaacccactttctctaccagttcttgacaaatgagtggattgaatctgcatgattactgcccaaggatcctgaaattcatttctgtatcattgccacaaatatgcgattaattattggggagttactataatactcaatgttttgccaagctagtatgctccatttcaaataatctcctaagggatgtgttttctccttacctcaatagaaacaaagttatacttctataagatgaggataatgggaagcagctgaagataacatagacgatgaagacatatacaagtaacttttggtgctttgtattctgatatattcctctgatcttcaaaggcaataaaccagtggacctctacatctctttcctaagcagatattatatgacgagtccaagagtactccaagtacaatgcaaataaataaaattgataagttcgtcactccttttatttataagaagatcgaacataatgaacaaaaactaaggtcagcaccattagaaaagaattaagatgactgcattttccgtttggagctaacatacaaaaagtcaaaaacaaaatattaaacctaagcccctagttgaacaacgaataattactgtataaaaactgtataagggcagcatgtgttcttgtggccaggtttaatctggtaaaatagaacctttccagtgttaagacttaaaagacacactcactacttcccttttcccatgtctcattctactaacatctcatacttttctttaacataggcagaaacccttaatccacaatgagaaaatacaaaagagtccaacgaagcacaaatcctaagcaaaaaccaccctatatttttctctttttaattattagtgcctttccaatccccagcttcaaaacactaaagcaagagtgttcataacattaataaaataaaaaagagcaataaagcaagtgacctcaatgaaggacaataaaaaatagaaactgatatatcaagcaaaacccaaattgtgtatgtcacaatggaatcatatatcaacaactaaaccatggaaaggctcaaaattacaattcaccaataaaatcaacccgagaagagggactcgtcgatttcaatcttcaccacctcattatcttcgaacttgtctttcttggaaggtgccggtggagcataaggccttggtggtccactacccttcttcttgtcctttggcctcgcctaataataataataataataataataaaaataacaacccatcaaataacatcatattagaacccagaaaaacacaacatgaaaaactaaaaagtggaattttttttgaagaaaagtgaaaatggcataagaaatttacatttccaaatgaatgggcgaagcgctttccctttgcagttttccggtcccctctgccacagtacactgagagagagaaacaaacgcaaaatggggaaatggggtgttagaattcatacaaaataaagaaaatttaacaaaaagtttgatttttttggttgtcttgcagaaagtaccagaaggggttggggagagagtggaggttgcacaggctgagagggaagggaaggaagtggagagtggtgaagagagagtttgggagtgagagaatgaaaggtgagaggtggaactgtgcaattgaacggagagtggaggaggtgatgctagcagtagacacgccatggctgaggataactaaagagataaggtttgagaaggaggaaaaaaaaaaagaagtgatggtttgccttgttctaataatgtggagctaaagtggtgttgtaaaacaacgagaaaacaaaaaagaacttatgtggctacgattaacaacattttaggaaagaattcattttgaatttttaatcactttaatagtcttataatgttatatagtatgtaagaattttgtttatttttacttgtggtaaaattcaatttagatttttatatcacttttgtgggttctatatttgaaattaactatacatctttaataacaaaattcattttagattcttagaccattttttatggatcctataatatcatataagatataataactttactagtttttttgatttagtgataaatcccaatttgaatttttgaatttttttgttgggttccatattttaaattaattagaaaaatattaaaaaataatatattttaaaaaaagagaagttcttgggagttattcctaagaatgacaaaacgggcctggacaggtgagcctgtccactagcccgctattaatttggtgggttggtccgactaatattaattttttttataaatcataattatattaagatgagactactaaaaaaaatttaaaaaaaatggtaagaaggatcttttagtttgatttatgttgaattatttgtattgtttaatattttaagactagttttagagtttatgattttgtgttataatttaactacttggtagacttattattattagttattattgaagcctattagtatttgtgtggtttaaatactgtgtgatttaatattttaatactagtttgttattttaaatactttgtattgtcaattatttttaagagtttttgttttttaaagggtgagccagcccgccagtccgtcagtccacctttaggtggaacaagccagcatgtccaatccatcaagtttgagtaggacagcccgccccgccctgttttgttatccctagttcttcccctaaaacccaacctctagcatgaagaactcttaagcaagaatagtgatagttccgatggacagaggttcttgagttcaaacactcaactccaagaactcctattaaagattctcttagggaaagaaacattaaaaactaatattttttgaaaaaagaggaattattgggagttcttcccttagaacccaacctctagcatggaagactcttgaacaagaatagtgatatatccagtggacaggggttcttgagctcaagaacccacactaaagattctctaaggtgaagttgggaaatccttcctccctcgtggactgtaaatactaattgttagatacattaataaaatattcagtgattaagataaaagaaaggcaactagatatgcaagtaaagttttaatacattttttctgataaaaaaaatattttttaatttcatatgatcttcctccatcttccttgttggttttccaaatttggttttatttctacaatctacatattatcatctcgtcgataattcctgtcaccatcagcaacacccactacgtcccctattgagatttttttaaaattgacatctgaccatcatcccctttttcctatttcctctatcgcaccactgtgaccatcattccctctttctcctttcttcatcaacaacaaaaacataatcaaacaaccccaaaaaaccaattcatcccaaatttcaaatcctcaaaatcaaaattgaaagcaactgagattcaagaaagaacaaaagcaaaaccaagcaacttcatgactgatcaaacaagacaaacaaaccataatctaacaaataaaacaaaacaaaatggaacaattcaaatctcaaatcttagatctaagaggaacagttatggtgttcggagtcgctgacaagtggctatgggttctcgatttggctctagatgtggtggtgtgtggtgggttagtgtggttttgttatggtagttgtttgaaaaagaagatgggggttacgaaagatgatggttgtgttgggtattgaggggtgagagagagataacccgaaattaggtcaggaagggaatttagggttcattgcacctcacagacatgctagttttgaaaaagtgtggccctccttcaacgcaaaaatatctcagatcttgaagaggaagtgttgtcatcgtagttaacgaggaaaaggaggagttgatcgtgtcaggggtgaggtcatatcttgcaacaagagaagaagaaattgataatgagaagagaaaaaaaaaaagagtcaagacgagagagagagagagaaatgagtgaagaatgggagaggaaagagagaaaaatagattttttttttttaaaatagtgggtggctctagcaaagtatttaccaaaccagtgttgtttcaaaagtatttacattgcagggttgttttctccatgtacgatttacgaggcaccaccattagtggtataataacctttgtgtaaaaaaaaaaatctggggcgagtagcgccacagtggcacgattagcgccacaggttttgcaagttggcgccagtagcgtcataatggcgcggttagcgccacagatgctggaagttagcacgagtagcgccaaagtggtgcggttagcgtcagaagtgctccagaaagcctgtttttcaatggaacttggcgaggatgacgccatagtggcacagttagcgccagaacacgacctggaccactatatagggtcattttacacttttttgggagccaaaacagccatcttcttcctccctactccgtttccaccattaaagagcttggaaaactccatatcttcaccaaacttcaccgaacacttcccttcaaacttgtagggaattccactatgagctagaatccttcatcacattttccttaaaactatcgaacagagagatcgtgttctctaaggaacttcacaaaactcgagttcgacgaggaaaggaggcgattcacggacacccaagcttgggaaagtggtccactagctttccttgtcatcttagaggtaagaaactcgagttttaccatttgatttgtgattttgttcttgggatgagtagtgacccatttgagctagagttggaaataggcataggtcctttagaaaagtatgtttagaaggttgttgtgatgaaggattagctttgaaatgttagtttcatggactttggtttttggctctgagaaatgcatgtatagctagtatgttgggttatttgatgatggtataacatgcatgagccttgttgctagtactttatgtgttcaagaagttatacaaacggtgtttttgggtataagaagccgtttagtcatattgttcattgttgaactttgagcttgtataactttgtattggatagtttcataaccctaagatagaggacatagaggtttatatggaaaggaatgatgtttcctttcattgtgactgttgagcactgtgttatatgcttatgccttgtgaggttgaattggttttgattgtacttgtatgccttgtatagggcatgacaccgagggtgttagtggtgtagaccaccgttctggggttgaactgcagagcacgactttgccaagtaagttcttcgctcttggggatgttttccattgctgtgttctaccatactccaagtgatggttgcattcgtgatgcatgtgcattgaaatggttgttgtattctttgtgatgatatgtatgcatgatcctatgcttggtatgtatggttacctgttgatagatcttctggccagttagatacatatggacctccctaggagaagagcgcacctcctagtttggtttgctcacgtaaagggtaatgatgatcccttaagaccaagagataggtggtcccgtcgcggttgaagcctattctcggaggtgccatatacgtgcatccatgcgtaaggggtagctcccgatgggatggcacgggtgtgagttccggcctcacactaaggactgagagtcctgatgctgatgatgatgcatccagtagcggcatagttccgcagatatacattagagctagatgattggctatgtattgttgtgagggccaagtggccagtgcttgtgatgcctttgatggcatgtgtcatggaagtgagccagggaggaggagaagcctccaagagccctgagcttactgagatgtgtatctcacccctgtggggattatgttttgcaggtgactcatctggaagagatgataggtctcagggcgaaagaccccagtagagacagtcctgtgtagctgcttggtagcatttagagagcttgaaggctcagttgatttgttttgttttcatgtattttgtgccccgtgagggaagatgtgtgtgtgtacacacatgtatatggacttgttatgtacacggactctatatgtgatgtatgccctcgtgtgaggaagtgatctttgatatcagagcacttggtgcttacttcgttgtatagacactgttgtcttgatgatgtatatacttgtgaacttctcctgatatatctgtagagatattgtagatgtatctgccgttgtctatgtttgttcggatcaatgaggttggcttatgtttatgttgagtattaatgcgtaccatacataatgaatcaagaaatatggtttcgaaatcacttctgcggctttttaattaaagtaattatgcgcttatctgattagttaatatgttaatacaccggatgcatacgaggtgttacaagtggcgccttctgtcattcatttgtcttcttgtaggaggcgccactttgggtgggtgaaccaatattgggtctcgtcaacacctgacataagattagtcagtgaaggatgcgtaaacctatatgcctacacctgtatcttcaacttgtaaatatggttggtggattttcaaaggaaggagacgccaagtgaagttgctccttgttttctttttcttttattattatgttttagattttaaaaatttgctcacctttttatcattgtatagcaatgccacaatataatgggaattggttgcatggtggaaacacttgtaagtgtataggaacccaaacatgttcttgcatgtttctactcaacaagtggcaaatgaagtttttatgtatggtttattgtagcatgttaagatgaatcatataagattgttgattcattcttggtattataatatctactaattagctaatgtatctatgtatgataatcaagtctttcgaaaaataaaattggtctaagtgtatgtttggtagagtggaaagaaaagatgtcaaagtgaaaagagatgaaagtttgaattaaagtagagagtaaaagtgtagatctcacgaaattttattgtttattttacttcttttccaccatcttttgtctctacaaaatggagtataaagcaatgggagaggagcttatataagagactaaagttaagagccaatgtgcattcatggattgcatgaaaaaaaaaacaaggaggtaaggagcaacttcacctgatgtcaccttcatttgaaaagccatcgaccatactgataagttgcaggtactgatggaggcatataggatggtgcattttacactgaactatcacgtttcagggactcatgagacccagagttggttccccccacccaagttggcgactcttgcaaaaggacaaattgaggataaaaagagtcgtttaggatggcgcctcctaaatcctatgtggcaaacataactcttgccatgtaaatacttttgaaattgcactagtttgataaatactatgttgagatcgctcattattgtaaaaaagtataaaaaaaaaaataaacatgtaaagaggaaagaaatagaagaaagagataaagagaaaaaaacataaaggtggtagcataaagtacatgaagaatttcatatatttactatttttttgaatttgaaattttacaatttaagtaatgaaaatactttcatacatttcttcttaaattccatatctaagcaacatatttcaacctaaaccatttaaaattttctacaacataattccaaacacaaggttagtttttgttttttagtcttaccatttacaattaactctagttagtttaatacatgactaacaaaatatactgtattaatcaattagataattaacgtcacgaagaatgttttaaataaagaatattaaattatttttgggtccatcatgcaatgacatgatgtaattattattttatttacataaggtgattacatataatttacttttataatttattttaaattttaatatattatgaataattatttttattgtttttaatattattattactttccgtttcactaatttacctattaatattgtattttttttagaaaatacaatttactaagatgtttataatttattttcaatatattacttttgtctttgaagacaaaatcactacttattatatatatatatatatatatatatatggaaaaatatattattatatttcgtcaatatttatgaattcaaaactaaaaataatattaaaagtaaattattgaactgaaaagcaagaacaatattaaaatcaataaaaaaaattcaatgatcataatatattaataattaaaataaaatctaaaagtaaataatatgtaattacattatttatataaaataagaaatatactaattatgcacctaaaaataatctaattattttaatttaaaatattcttcatcaccttaattatcttgattttcttcacttcttagccatgtgagcactaaataaacaagttaagagaaattcttacatgaaaacaaatccaacactttattctttcacacaaccaataaaaatttgacaactaataaatatataaacagttttactatacatgcgcacatacaatcatgcaataaaataaaacgagtaaaataagtttttgatctctggactttccttcaaatttgattttagtccctatagttttaaatcaatcaatttgatttctatacttctaaaaatgggtggatttggtccaatatactatttaaaaaggtggatttggtccatatttggtccttcgctcattaatgcattagcactaaatccacctattttttaaaatatatgaatcaaattgaccgatttaaaactataggagactaaaattaagtttgactaaaagtatagggtcaaaatacatattttacccaaataaaatcaagcaagctaaaatacacattttacccaaatataattaaacaagctaaagatctattaagtttattttagaggaagatatctaaagctattacaacttttactttacaaatacattgacatcatcaaaactaaaattggaaacaacataatactccagtcttcaatcttcaataggtgtcttggtcattatatctcactatgtcaagacttaacatcatgttcaatgtatgcctatgtactagattccagtcagatcctaaggaagtacacttaactattgttaagcatatatttagatatttaaaatgaataactaatatacttagttagatcctagggaagtaggtttattatgatgttgattatgctagaggatgtcacttcattagtggtaacttagtttcttacataaccaaaaggcaagaaacaatagctctatccacaattaaagcataatacattttagctacaagttactaccctcaacttttatgaatcaaacatcaacttgatgattataatatccatgaaagtaaaatcactattctttgtgctaatattgttgttattaacttgtataggaatccaatattgcattatcatgccaaatatatctaaattaaatatcactttatagaagatcactttatagaagatcatgttcagaaagggataatggatttacagtttgttaacattgaaaatcaacttgttgatatctttacataactgttaaagataaatttgttcatctaagaaaggaccttggaatggactttataaaagaatgattaattttgatatgtttgcatctagaggactcaacatctaatgtaatgtatcatgtgtctttgtccttatttgctacgcatcttgtgcatagaatgacattttatttgtgcattaactgccaatgatttgaaataaaatgtcaaaatcccttgttgaatcacatcaacagctatcctacacacatatacctataattgtcttagcacatttcattatgatgcattaaatgcatgacaattgcctttttgtcttgcatcacaaaattcaaactatcggaaaaaactctttatcttctaccctaacttagccaaacaaaacgaaaaaacttgacctgatttctcacttactctctcttcaaccaagccttttgagaacaaagtgttcttactctcttctctcactagaaacaaaagcccatttcgagccctcaacactacaaataagacttttgatgatggttcttcagggtctttcatgatgatttttaaccgtcatgaatccatcgtcatagaatgttgatagctttccatgatggtcttaaaaccgtcgtaaaatgtaaatatgttgcatttttacaattaaagcttttttatgtgtagttttatgattatttttttcttcttcagaaaaccaatgaccattttttttaataccgtcatagaagatatactttctatgatgattttcttgaaaatcgtactaatcttgagctttctataatggtttttttgaaatagtcatagtttttcattttttgaatatttattttgttttgcaacaatccaacctataatttaacaaaaaacaaatccatgcagtccagaccatatgtaacgaaatgttttaaaaaaacattattgaaaatgatatattgaatctctatctagttgagaggattattcttaagaaatcatattttaataatacttcttttgcttaaaaaaataaataaattaaaacgtattggatggctataaagtgtgcatctttgttactaaagaaccaaatagtactcatttatgcatcttcgaagagagttacttttaccatgatatacctttattcattagaccttaatttataattttccaagttttgagaaccatatatatatatgtaaattcacatagtatatagtatcgtagacgtgacacattttaatttcacctatacaaacatcctctgtatgttggtgtccagtaatctagtccactactctcactgtgaactagatgtgtacatgaataggaactaaacacagacctctgtctaaagttctagctttgtgtcctccttatgatcttttctatccaagcttccccataaatccttcaatcccatgaaaaccaatgatgattaattaatacggataattaattattgctgagagagaaaactgtaagatttatcattatggctcatttaaataaatgtcatttgatttaataaataaagggcataaagataattggttacaaaacgaagttattaaagaataattgttaataaaacgattatcttaaacgtattaaaaggtaactgttaatatatgcagttatattaaaagataaatgttgataggtgtagttatattaaacgtagtggttcaattttcttaaaaagagagatatctagaaaactgaataccatcattgtctgcacatgagagttgtatccaatccctatcaaagaagatacaagaattgaaagtgtcaagactttgagaaagtattctgtcattaaaggatcttccctaaagaatctacgaaagcattctaccaataaagatcttccgcaattatggataaatgtatatgtatgtgaaactcatgaattctaaagatcatttttcatgttcttgatgtgattgttattgaacatgaaattataaataaattaatgtttacatgtggtatcagagcatgatttaagaatttgtgattttccattactaagtttttgttgatacaacgataaagtattatggtaggttttgaatcttaattttctgcttgttgcgaatattattgatcgaataatgttgatagaataatatcacagaactgttatttctcaattggtatgtattatgttcccatggatatcatgataaagctcttatggtcttttcaaacaagatacattaatgttggtgatgaaaagtaaacaataatgattgatcattttattgctatccctaattaaaaattgtaccaatgcatatttaaaattatatttgataaagttatatgtgttgctatgttgtgattgaataactgtatatattttgttgacattgaaaattaattatgatgttagaatgtgtttgaatgttgttaaaatcttataattttaacatatttttgtactttatgaggtgtttatatattgggattaaagtaaggtgaatttgttagtcaccaaagtggccaaatttgtatgagtaatttaattccaaattgtatgttcatttcaaccatccataattatgatgctatgaatgtattaaaattattattttatggatgagttgaagtttattattatgggatagttaaggattaacccaaaggatgattatttgtcatcataataaataaaaatgaatgttgacataatagatatgcaactagttctatttatatatccaaagatagtaagtaatcctagttagtgtatgtattattgtcaaattattaaaaaaaatttattagcatcattatagcttaatgttgtgtattaatggatccccaaaggtgaacattaatatgcattttatgatgtatgaatctgtgaattatgttagtatgtgatatgtatgattcaaagcattaatttttttcaaattttataccttgcagtacctgttgctacacatttgcttttctcaactattaaagttttcaatggactaaacttctctgaatggaaagagcaaattgaattttaccttggggtaatggatttggatttggctcttagagaagagaaacctagtgctactattgatgcaaacattgagtatgaaagagtccattttaagaactgggaaagatcaaatagattgagtctaatgtatatgcgaataagcattgcaagcaacattaagtcaactcttccgcaaattgaaagtgctaaagaaatgataaaacttgtggaagagtgctcccaaactgctgacaagtctcttgctgggacactaatgagtacactgaccaccatgaaatatgatggttcacatactatgtatgagcatgttattgaaatgataaacattgcagcaaaattgaaatcattgggaatggctgtggatgagaatttcctggtgcagttcatattgaactcattactatctgagtatggtcctttccaaatgaactataataccatgaaagacaaatggaatatgcatgaattgcacagtatgttagttcaagaagaaatcagaattaagaaccagggaattcattccatcaattatgtcaaacatcaaggagctgaaaagagaaatggtaagaagcatgagaagaagggaagaggaccattaaagatcaatcaggcttcctcttctcaaatccacaagaaggaaaataatggaaacatatatcatttatgtagtaaggttgggcacttccaaaaggattgcccaaaacataaggcttggtttgaaaagaaaggcaagccttgtgcttatgtatgttatgaatcaaaccttgctgaagttccatataatacttggtggattgattctggatgtacaaatcatgtttctaatattttgcagggattccttacgacccaaaccacaaggccaaatgaaaagtttgtccgtatgggtaatagagtgaaagttccagtggaagttgttgggacttaccgtttgatccttgacaatggacatcatttggacttatgtgaaactctttatgtacctagtatatctaggaatttagtttctatttccaaacttgataaagctggatactcttttaaatttggtagtggtagtttcagtttgtacaagcacaatcatttgattgacaatggtgctttatgtgatggattatataaattatgtcttgataatctttatgctgaaacgcttatgactctgcatcataatgttggtactaaacgtatcttaattaatgaatgttctgcttacttatggcataaacgtttgggacatattttcaaagaaaaaattgtaagattggtaaagaatgaaatccttctggatttagattttactgatatttgcaaggcactaaatgtcacatgcttacttataggaggtctagtaaccttgaagtgattggatacacagactcagatcttgcaggatgtgtggatgcaagaaaatctacttatggttatctgtattttttggcagaaggagctatatcatggaaaagtgcaaagcagtctataattgttgcatccaatatggaagctgaatttgtggcatgctttgaagccattgttcaggctaaatggttgcgaaactttatttcagggcttgaattggtcgacagtattgataggccgctgaaaatttattgtaataattctacagcagtcttcttttctaaaaacgataagtattcaaaaggtgctaagcatatggaattgaaatactttgccgttaaagaagaggtttagaaacgtagagtgtctacagagcatgttagcactaattttatgttagttgatcctttgacgaagggattatcgcccaagacatttattggccatgtatgtagtatgagcattatgtcagctaatgaatgttgatcattattgtaattattgactattgacactctgaattcaatgatgcttaagtttctgaaaattaccctattttcaaatttatgcatacatgcatgtatgaatgattatgtgaaaaataggatttgtccctaatgaagacataatagtattattgggggacattatgatgtaaacttccattaaagtatcatattaggaagaagaactaatatagtagtacatggaaggaactatgccgatttgataacatataaccgccatgactcttattggttttatttctgatcatgatttatgatgaggccaatatatgaaaactttagtcctatgaatgcgcattataattgttttcattaaatcatgaaatgaaatttatgacatgagccaagtggtagaatgtaagatttatcattgtggctcatttaaataaatgtcatttgatttaatgaataaagggcataaagataattggttataaaaggaagttattaaagaataattgttaataaaacaattatcttaaacatattaaaaggtaactgttaatatatgcaattatattaaaagataactgttgataggtgcaattatattaaacgtagtggttcaattttcttaaaaagagagatatctagaaaactgaataccatcattgtctgcacatgagagttgtatccaatccctatcaaagaagatacaagaattgaaagtgtcaagactctgagaaaatattctatcattaaaagatctttcccaaagaatctacgaaaacattctatcaataaagatcttccgcaattatggataaatgtatgtttatatgaaactcgtgaattctaaagatcatttttcatgttcttgatgtgattgttattgaacatgaaattataaatagattaatgtttacaaaaacttgagaaacttttaaaatgaatgaacaactttcttaccttgtgtgaattagctttcaagtaagggttgctttgcagctgcaaaatatgtatgaattttttggtaaaaagacatgcatgaatgcaattgtaaattaagcaaaaataaattacgttaaaggaattgaacaacaagaaacttaacctttattgcataataattaattagttgtatttgtaaaggataaaataataattagttaaatatttttgtgtttaaatttgcatcttagctcgatgttatatgttggggacagccaatggttaagtatttacgtaatcaccctttgggcatcacccctgttttttttatagcatgcaactctattactgtaagcctaaaacaagatatatctaaacagaccataatttgcatttgctattaaacacaaggactatcactactattcattggaattatactattattaccataggatcttttggtttcctttttatagctcttgtacaatgcttcatagccttttttgttgtgtgaataattcatttcctacatttcattgtttctagtatttagaaagttagttaatattttaagcaaggaagggatatacacggtcttcatctctatccaaaagacaaaaggcttctagaaactcactaatcacaatcatataaatccaagcagattataatatcagacataaggtaaaagaaatacctcatcatgcaagtcacctaattatttaattatatatggcatttcttctagcacttttcctttaaggccgttcgaaatactgagaacaaaagaacttgaacctcaatgcatgagaaactgatcagctcaagaatctacatttaacaatgaaataaaggaatgagaaattaataaaacaaaaggataggcatacctcctatatacaaagcttggaatagttgatgacataatataagcatgggcccaataaattcatgtaacacttagcaagtgcctacaaagagaagaaattatatatagtagtataataaagctcctctatccctctctttattgaaaaacccttgattaaagagattccatgtatacattactgtctccacacaaatcaagaggcagcataatatccttcaagcataagaattttactcttaaagaaacacttaataacataatatggatatgtatgaaataaaacactttagttcaattgagaatgaagataaatttaacctggtaccaatgatctcaagcaacttgctttggattttgttacctattgacttggtcaataaatcattaatttgttcaaacttcatagtttgtggttaaataaaaattaatcttggttcaaattgatgagcagaccccgaagataaatgttcacatggatttttgaactgatattgggatctaggaattacttaatagtgttccataagcctaaatctagaatcaacaatgatgatgagtgtacttggacttacaaaggtatggatttaggacctttacctcaaaggctaaataaaacaacccaagcaaatgagcaagttgcaggacattaactccctgctataaattttctagttgaggtctttgtagaaaacctcctatgacaaccatagatttgaatagaaccacaaattttggcatggatcaacaattatctgagacctgtaagaaatattgcaatgcattaataacacaattataccactctcaaagggatgaaacaagaaatataataagaaaaaaggaaattaagatgcattgacattgagaatataagtagtgtttgatatgagaatatatacaataaaaggacatggcctatacataatcaaattactcactgtagacctcagttacaacatagaacctcaagtaatgactaacatattttttataagcatacatatagtttacacatttatagagggaatataagtattgtaggaatatctagctagtggaggaaggagcaatgttagagaaaggcaagcaatacctgtacacaagaagaagaatgcatgaggatgatgcaacaattactctaaaaatggtgagagtagctagtgtagctacctgtgtagaatatgagggatttattatatgtaaattattcgaacacatgtgaagcaatattttgaaatcctgatggatgaatcaaattcacttctcgcccatgtgaatggccccgttgaacaaacttgcgtgaatgtcgatacattcatattatcaaacacgttctgcataccattttcttatatacaccatttttctaaagttactatgctataactcaataacaaagagtgattggaaacaacaatatgcataaaagagagatgtttcatgcaaacaaatcaatttcataataaattacagtgcaaatcgcaatcagaatcaaaattcagagaaatgagataatcaatacctatttgtggttctacatgagatgcaatgagatttagaattgtaatcacaattgatgaggaaatcaaatgattaactgagattctgttaggctttgtttgggagttaggaggggaggggaaggaaagagattcaaggggaagggaggggaaggaaagggaggaaaataagggaagttcatttctccttgtttgggagttaaaaatatatcaagagagaggaatagaaagttaataagaaatttttacaattttttccttatttaaaaaattaatatattatatattttacactgactagggtaggatagtaattttattaacactgactagtataataataattttagttacttttcattctaaaaactccccaaacaggggggacaacaattttaaggctttggagaatttcggaggagttttgaaaatcatcaaatcctttccctcaaaaattaaaattcccaaacaaggggatgtatctacataaacttttcccttccctcccttcccctctaaaatccctctcccaaacaaagccttaggggtttgaatcacaatatgtgcacatttcccatacatagcgatcaacacattcctcacaaacgagtcggagaaaccaccagccttcaacgcgagagtgtggacagcttccctgagctacgcttctgcgacgcatgcgcaggtattcgccactagccttcaatgggagcatgaagttgtccggcacgaagtccgtcaccgagagcaactcaaggaacaacgaaatcatgtcatgaaaaagcgcattgcaggtgtagccgctgagtagtgtgttgtagaggaacaagtccaaggggaacccacatgcggagtacatggcaataatgcgggtgttgagaacgatgtcattgcagagtttatgcgactcagagaccacaatgtgcacttttcgcccaacatcgatgtttttgtggtgtccgcatgctcttagtaagaggccaagagcttcttgtgtaatgtccaaagaggaaagaatgtcgttttgggcgtgtgggtggagcaagttgagggctttgttgaggtttccggagtcgcaaaagattgtgaaggcttcccaaacgtgatggcaagggcaagaccatgcaacgatgatggcaagcgcaatccaaggagagcaacaaagagagcacgagaggaactagggttcaaaggatgagtgagtaagtgatgaagatgagcatgggtgagttaaaaaatattctataccaccacggtttttaaaaaatgtcattgaactaactcttttatgacaattttttaaaataactgtagttaaacacactattccatgatgattttataaaaatcttcatccctcatatccatttatttacaaaattgtcattgtgttttctttaacgacgacttttgaaaattgttgttggagcgttgtgaaagaggctttttgtaattgaagagatcaagaatctatacaatgaatttgagcattgcagctagaggcatcttagcctcaaggaagcaaatatgcttggtgatgcgttcgcgaaacattgtttatctataatttcttatggtcaattcttttgtaacattccaatgtttgctttggacacttttcaggatgatgctagttgtatctttggtcaaatggctcctaactgagttcccaacgtattcataaaaaagaaattctagcattgttcactaattggatcacttcgaatttaattgattagacctgatttgggttttaaatttttttatccataatctagacccaagtaatttgattaacgtcgaattaatttagttgaaataattggattatgataaaatatatattttttagttttgatctttaattaattttatttatttaatatttaattatttctataattgtcactatatatttcattaattttttattcagaatatatgataaaaattacataataaatatgaccaaattataagccacttaataatagtgctatacaacatcacaagaagatggaaataaataaagaaagaaagacaaataaagaaaagttttaagtacccacgactaatataaccaccaaacatgtaaattaattgatgtgaattgtttcagcttaatcaaaagttttggattcaagtcttgggtatgtagttgccatctttagcggtcttatccgacttaaacaacattgtttccattgaaagataattgtggtctagacaaaagaatattaatataaaattagaaagtaattgattggataatcaagttggttttagttgaaataagataaatcagaaaaccaaacttcttataattgatttgttttagtttggattgtggggcttgttaggttaattcgatttgatgaacagcggtaggtaattcaagtcaagtaaaattactttgagtagccaaactttctctttgagatatcgaatgtaattggatacctgaaatttaaatccaaaatcttttgttaaactaaaacatactttggactatttgattctcgtgcacaatggtcctaaatattgagtaccttattaattttttttttcctttaatgtatgtaaaagtaactatattttcatctcaattttataactcctataatgcaaatcttttttttccgacctataatgtaaatctaaaacaattttatgcaatgcatgaagtaattagaaaatattatatctacgatgttattgaaaatattacacaagagatttttttttgttagaagcaattgaactcatgtataggaggtttacaacaaccaacatattgtttaacatattgttagtaggaattgaactcagctaatccccttaattatacaacaaaatctaaatactgttataattaaaatctaattgttcaaaataaaatatttacatttatttttaaaatattaaatactatttgataaatgatatcccagataaattatgtttaattgattttataatttatataaattgtttttgccgtaaaatttagatattatttttcaaatgataaaaaataaatatgtttgaaattaaagttattattaaaataaatatttttaatagaataatatatcttaattatttttattacattatcttcttaagagtggttcattacaatgaaaataaattaacagtgactttagacaatgcatccttggacccaaccttcagcaaaagggccttgtagaactgttgaaaaatcttgacttcggtgcacaggttgttgtagacgaactcttgtagttttctatcatcaaggccctctcaatcgtcccatgcttgtcaaattctacagctcagtttcttgtgaattcagtataggatttctagaaagattgatagccatgttcagtttgcttgatttgttgtgcaaggaaaaacattaactcttccattcattttaaattatgtctgcatcaacttatattatatttaattagtatatgcattacacctgttacaatggtgatgcacacgaaaattcataagaaaaaaaaaaaaaaacaataagtatatctatctacctgtctgttgtgtgaaagagtggatacaaacccccttccttattagctgcagcaaaaccatcacactaaggcccatagaagaaaattgaacgatgagaagcaatctaagcacacagatcaaagttctgtttttaattccaatggaacacttggactaagcataattttttgttccttatatattctctatgtatacttttatttttctttcttattagaaaatagaaagttatggagaagcaaaatcagtgaaactgtgactgttaactagcaaaaacattattcctagaacaaaacaagattttttattcactcatttggaaaaggccaatataccagacacatgattccacaaagtcaagattttgatttgctcatccagtaaaacgcaatcaattaacagacacatgattccacttgatttcacatttgctaaaggaaacttgctgaaataagaaaacactaaatcagtttttattgcgggatgagtaataggtctgcataactgtgagaataagaagtacagctgctgctaacactcctatgaatttccacaccgtgggaatatgatcgcgtatcaaaattttgtaccagtttccccaatagtaaacaatgatctgcaaaacatgtctgcacttgtgccaagtgactacaggcaatccttgaaatgcagtagtgacttttcctcttttgtacatgttcaaccttgcacaaatttcgctatagctcgaatccatttgctctgctcccttcgtaattgttcgaaacagatccagcagttcatcgttgctcttcccggcctcgttcactatcaccccattcttctcaagcagctcaatgtcatgcttacaacaaaccaaaccttgaaagaacaatgcatacgaagtgtatttacatctgatccaaattctgctctgctcccacgcgatcaaattcctccacctcacttctgtagtgtccttaacatacagcggtgggatctgcaatacgctgtcactgaaacttatctcaaagttgaaccaatccacaaacttatggcgagcaacggtgtttgctgctctaatttctactcctgcagcttgaagcctcgtggcacagcgccatagctcttgctccaagcgtttaccctcttgctgagactgttccacagtggacaagtgcatcaagtgaagtatgtggaccgggtctttcacatcagtgtaaccgaaagctttgcaaacgatatcagcaacccggtgatcgttgtcgatgtcagtggcaacgggaaagaccttcctatacaacttcttgagaacaatgaatggaacttggttctcaagcattgtgatatcattcagaacagacaccatcttctcctcatttatcagtatagggtcatttgcataattattactattgttacatataaagtcaccgatcctgataaggagttccaacagaaaacaaccatctacaagcattattttagccaactctcgcggtttcgattcgatgttacctccatagcttgccatgattatcttatccagcttgaggatatcggtgccacagtctctgagcctccgctccgaacttcttttctgctcctgcgtgccttctcttttgagaaactcgcgcatgtaatgccattttgtctcttccattagctgcacgtgcctcgtggttcctctgtgcaagggtcctatggagacctcctttggcttgaaagctgcctcgttcgggcttcgaagctcgtctgtaacgcttgagatgctgcaggcttggacttgtccatggtggagtgcacccagcatcacttcaatgggaaccatccaactgaaatccggttgttgtgtcatcttgaattggaaaattggttggatggattggaagagatcgatgtgttggaatttcgaggagttaaataccaatgatattttcaccaatggatcatcagcacaccatataagcgaaccggcaccatactttaacccaaacaagatgaaacaagaattgggcacaaagaattgaagtgaaaggaatgggagaaagaattggtaaagcacatatgtgaccgagaccaattttagttgagcttccctctcggttccttctgcgatcccatatatgccttttgtggaagtgaaggctcttagaaaacgatgggaaaaaggaaaagaaacaagttcgaagtttccctgttacttctcagaaaagttgtggaaatgattggaaatgtgaagactggtttattttggagtcaatgctcaataccactggccggtggaatcaacgcgttcgaacagtgaactaatgtcctgttgtatcacaagtcaactagttttggattttgtaaggtataatataattatttttataatttgttgaaggctaaagtatactttttatcttatttttttctttcaagttgatatttttttttatgtgtgggaattgcattcgatactatgaggttttgcaaaactcacgtaccatgctcatcaaccaattgagttatacctcctttcaagttgatttgttaagcttaggaagtttcattttaattcctttgagtttctccctagaccaatgctcctcttgtcaatgggtaaatgtccactttagtcactgcactcacaatttcatcctcaaactatgaaaataatccatttaatccacaaatgtacttacaatttagttcaagcgttaaattatctctgttttgttaatatttttggtgatgtgacacttgaagtacaacgtggcaaatccatgtgacggaagcgatattgtgcgttcaagtagatatctatggaccaaattgttagttctatctttttgtttttacctctaaaagtcaccacacaaagtggtaattcatcttggcctccttcgtcgttatggagcaaggacactctaagaaagaccttcacaaactcaaccttcatctttagtttctccttcatttttagctttgactcaaccccatcatacatgattcctcagttggttttgatgaggacgttgagaaggaaatcaccaacaccgagtggttctcctccttctccatgacccatgacaaggcttcttcaactctaccccgtctaggtcactagcaataaccatccattgattgatgtttcattttttattttcttttatttgttgtatttgtttttttttgttgattaacgtcataaatttgtttgatttttttgttattgtttttcttaatcttagttttttcaagtgcaaaaattggtttggactttggaggaattttgaaatttgaaattaattggttaatatatttcttgattttaagttaataatcctaattcctaaatttgggattgtgtggtttaaaattttgaattgattcaaatttggatttagaatggaattaaagaaataaggcttctccttgttgaatgcgtgtttgtaaattcacataattattgtaaattattttgtcatttagttatatttgttagggactattttgtcattgcataagaatgtattagcacgaaattaggaagaacaaccttattctcaaattacatgtaataccataattttgggtttacatataatcaatatttaaacttattttaattttgtaaacatgttacttccatttaattgctcaaatactgtaagttaagaaaacgtaggttggacttttatagaagcttttaaacttttttgtgattaacttcaaaaattgataccgcataataaataaaatgaataatttaaattttcatctagaaaagcttagcaattgaatgaaatgaaagagatatttctagtttacaagtaaggatgaaaaggggtatggccgcctatcaaggacctttggcttggcctgtttaagccctaacctgacctaacttgtttattttaaaggtcagactaaagtttttttgaaaaacatgtttaaataaaatgtcaaactcaagctttaaaaaaagtttattaggcttgtcaggctaccctcaccatcatgtgcaggaggggtggaggatactctgtcatctctcctcaaagttttcacctcctcaagcaactcctgattagccttcatcaagacttcattcatttctcgattagcagccatctcatgctgcatagccttctgcatctgcctatttgtagcaaactcatgctgcatggctgccagcacagtcgccactggatcaggctgagcatttgtcgccccactgttgtttctggatctcgtcatgacactacacatgtacaccaaacagtgagttgatcagacctacaactagtgtccacacatgcaatagtcatgtcaaactcaaacaacagtcacgagcaacacacaatccatacatgatgcttccatcaagaaactgctctgataccataaaatgtaacactccgtgtgcacccagtgtattaacattattatttaacagattagcgcttaatcactttaattaaaaactttgcggaagcataatcgaaaaccatatttcttgattacattatgtatggaacatagagcatcacatcataaacaacacaaacccttgctgatccagaaccacataaacataaccataggcagataaatcaactatctcaaaagatataaaaggaggaaacatcaatacataacataaactggttatgtacatatacatcatctgacactcgaagtgtctatacaaaagaataagcatccgagtgcttctgatctcacagatcgttcctcacacgagggtatacatagcatgtacaatacaaaagaaaatacatgtgtgcacacacacatgttccctctacaggggtacaatacataataaacaaaatggagcctcccagctctccctgctgccacacggccaagcagatcccgtctctactggggcctccctccctgatactgctcttctctgccagaagagtcacctgaaacaacataagccccacacggggtgagatatacatctcaataagctcagggtccttggaggcatctcctccgccctggctcactttccatgacacaagtcatcaggcatcacaaacatattggcctcccggcccggcctcctggccctcataacaatacaagcaagtcatcttgctctatgtacagtggatcaacatcaacaccaacctcagtgggagaccaaaactcacacccgtgccatcccatcgggagctaccccttacgcatggatgcacgtatatggtacctccgagaataggcttcaaccgcgactggaccacctatctcttagttttaagggatcatcatcaccctgggatatcatcaaccatgagcaaaccaaactagaaggtgcactcttctcctagggaggtccatatctatctaattggccagaagatctatcaacaggtatcatacacatacaagcatagatacaagcatacatatcattatgaggatgcaacaaccatcaatgaatgcatcatgaatgcaaccatcactccctcggagtgtggtggaacacagcaagtgggaaacatccccaagggaccaagaacttacttggcaaagccaagctctgcagttctttccctgctctgtggcctacgccactaacaccctcagtgtcatgccctatacaaggcacacaagctcatatcaatcatcaagcaatcacacaagcataagcatatagcacaattctcaatcgtcttaatgaaaggaacctcagtccttttcaaaaccactaagtcatctaacttaaaccttcatcttcacaacattctaaacacacttttctaaaggacccaaggctaattctagctcaatcacaagtgggtcactattcacccaaaaccccaactcacaaatcaaacggtgaatatcgagtttcttacctcaatgacgacaacgaaggcccaaggacgacttccccaagctcagatatccacgaatcgccaccgttcctcgccgaactcgagttctacaaacttcccttgagaaaggcattctctgatttagggcttttctagggattttgatgaaggattcaagctcagtagaggtttcccacaagattggtgtttaaaggaaggcgtttggatcaactatggtgaagaaataaagcttggagcttcaacaatggttgcaggtcgctcagaggaagaagaagcaaggttttctcttcaaaatcgcgacctgaccatttttatacctgctccgtcagaggtcccgcgctgatcgcgccacctctggcgctaaccgcgccaaacttgctgaacatgtggcgctggccacgccactctggcgccaaccgcgccatacttggcgctggtcgcactggaatccaaaggaaactgatatttcaggacacttccggcgccacctttggcgtgactaacgctggctgcaaaactatggcgcccctcgtgccactatggcgccattggcgtcaactccccaaaaccatggcgccactcacgccacatatggcgctactcgcgccaaaaaccagagaaaactagttttttgggagacttgtggcactacccgcgtcaccctggtgctaccagcgccatcctcagaactattggcgctaatcgcgtcaaacccgacgctagtagcgccacaccctagactgggttttctactgaaagaccctggcgctatccgcccgaaatctcgcgccagccgcgccaggactcagggtcattatattcaacccccctttttaggaattttgtccgcaaaatacagaatcatacctgtcaagcaaatcgaggtacaactgcaacagctcctcctcccgctcccaagtcgcctcctcaggtgtcctcccttcccattgcaccttgactatgggaatggtcttgctccggatccatttctccattcgatccagaattcgcataggtcgtgtaggactagtcagattttctctaatctgaactgtgtcaggctccaccacgtgcgaaggatctgatacatacttcctcaactgggacacgtggaaaacatcatgtagccctaacaaatgaggaggcaaagctatcctataggccactggtcctactctctgaagaatctgatagggaccaatgaacctaagactcagcttcctaacacccaaagcctatcctacacctgggaccggagacagcctcagaaacacatggtcgccctcatcaaactgcagcggcctgtgcttatgatcataatgactctgatgtcgactctaagctctcatcaacttgtctctgatcatcctgatctgctcagaagtctcctaaaccatctcaggtccaaggagctgtctctcccctaccctccaacaaactggagtcctgcactgtcggccatacaaagcctcatagggtgtcatgcccaaactaacatgaaagatgttgttatatgagaactccaccagaggcaagtatctatcccagctagtaccttgcttcaaggcacaagctcttaacatatcctctagagtctggatggtcctctctgtctgaccatctgtctgaggatggtaggctgtgctaagcctcagctgcgtcccaaaagcctcctaaagggcaccccagaacctagaggtgaactttggatctctgtcactaacaatgttctcagggacaccatgcagtctcacaatttccatgacatataactgagccaacttctctgcaatctagtcagtcttcacaagtaagaaatgagcagacttggtcagcctgtccacaatcacccagatggaatcacatccaacctgagtcctcggtaaccccactacaaaatacatagaaatgttgtcccacttccactcaggaatctgtagaggctgtagcagaccagacggtctctgatgctcaatctttaccttctgacacaccagacatttagccacgtgctcagctatgtctctcttcatccctagccaccagaaatttctctttaggtcctgatacatcttagtggcacctggatgaatactgaactggcccttgtgagcctcagataggacgacgtccaccagctcgcccttaggcaccacaatgcgatcttggtacaacaccaagtcgtggtcctcctaggaaacatcctattggccaatcatggccctcatagcctcatcctgcttctgagcttctctgatcctccgaatcagatcattaccaatcttggtctttctcaaatcaagaccacgagcaccctttgtcataattagacgcatatctctgaatttattcaatcaattcacaatcagaaatcatcatgcaggcggcactcacatgtttcctgctcaaggcgtcagcaacaacattcgccttgccgggatggtatctcaactcaaaatcataatctttgaggaactccatccatcgcctatgtctcatattcagttctttcttatcaaagagatatttgagactcttgtgatcactgaacaccaccagcttagcaccatacaaataatggctccaaatctttagagcaaacacaacagccgcaagctctaaatcatgggtaggataagtctcctcatgaggcttcagttgcctggaagcataggcaacaactttcttatcctgcatcagcaagcctccgcttggaagcatcacagtatacctcaaagcttccctcagggtcaggaagggtcaacactggagctgtagtcaaccggtccttcaactcctagaaacactgctcgcactcatgggtccaaacaaacagaactcccttccgagtgaggcgaatcaaaggtatcaccaactgtgaaaacccctaaataaacctccagtaatagtcggccaatccaaggaaactctggatctcagatatgtccttaggtctctcccaagacatcactgcctcgatcttactgggatcaactgacaccctagctgtagatatcacatggccaaggaatttcacctctgttagccaaaactcacactttgccaacttggcatacaactgatcattcctcaaggtctgaagaacaatcctaagatgcttggcatgctctgtctccgtccgggagtagatcagtatgtcatcaataaacaccaccacaaactgatccaagaaaggtctgaataccctgttcatatagtccataaacactactggggcattcgtcagaccaaaggggatgacctgatactcaaagtgaccatacctagaccggaagactgtctttggtatgtctgcaggcttgatctgaatctgatgatatccagatctcaggtctatcttagagaacactggcttccctcaactgatctaacaaatcatcaatacgaggcaaggatacttattcttaatagtaaccttattcaactatctgtagtcaacacaaagcctcatattgccatccttcttcttcacgaagattaccggtgctccccaaggtgagacactcggtctgataaactgtttggacaacaggtcctccaactgcaccttcaggtccctcaactccagaggagccatacggtaaggtgccacagatatcggtcctacaccagggaccagatcaatggagaactcaatctctctcaggtggtagttgagtaatctcctcaggaaatacatccacaaactcactaaccaccgggatctgcgacagatcaacactcggcttatcttctgtcacacatgagaagatatagccctgagctccttccatgattgccttgcaagcttgcaagaccgataggaaagagctggaacttgaaccagctccatcagaagccacaacaaccctcttcagaaaacaatccaacatcacgccatacttggccaaccaatccatacccagaatgatctcgagggtaggcatagctaggcagtacaaatcaatcatgtactctctgccatcaaactgaaaccgcatgtctttacagcacgtgctcacccgatacctctcactagatgcggtggtaacctccatcagaggagaaaaactcaacatgggcaatttaagcctatcagcaatcacatcctgtatgaaagaatgcgtagctccagagtcaaacaagactctcgcatcacaagcatcgatcataacagtacctctgatcaagtcaggagctctggtcgcttctctggcatcaatagtgtacactcggcctgctatgggtgctatcatttcaactggtgcagcctatgcacagctctctgcctgtgggcactcacgagaaatgtggcctggcttgccacatctgaaacatatgatctgtcctgagggacacgctcccaagtgctccctcccacaagctggacatttaggaagtggtcttctccgagctaagccactctggctagagcctctcttgaatctatcagaagaggtagagactctcaaatctttgcccttacccttaactggtgggccagaactgctgggccttctcccttcctgtctgactgagggagtaggatgactgcctcgatgtctgcgaagcatgtcctcaagttggcgacactgcctcaccaagctatccatatcacgggatccattactggccccgctcttctatgctctctctaagccccctctagaacttagcagcaagtatgtcagcatcaggtaaggatctcctgaagtgagcatatttggccagctcattaaacttggccaagtactcatccacagtcaagttcccctgaacaagaccatcaaaaccactaagtcatctaacttaaggtttatcaggcttatcaactacaacccctctaatagaccctcggtggtctatctcagcttaatcaaggcattagagtcaccacatactcaatgcaagccaaacacagagagctctaagctctatacagatcataactcaagaattcccaaactaacttgaacggtttccattatatacaagacaccattcacatggcctctcaggcacaccaaaccatataccaaggctcttacatgtcatacccacatcaagtgactcaaacacaagtcacacatgcataaccattgagcctaagccaaagttcaccaaactaacatttgagagctaatcctccatctccacaacattataaacacacttttctaaaggacccaaggctaattctagctcaatcacaagtgggtcactattcacccaaaaccccaactcacaaatcaaacagtgaatatcgagtttcttacctcaatcacaagtgggtcactattcattgccgaattagagttccacgaacttcccttgagaaagggattctctgatttgggacttttctagggattttgatgaaggattctagctcactagaggtttcccacaagattggtgtttaaaggaaggcgtttgggtcaactatgttgaagaaatgaagcttggagcttcaacaatggttgcaggtcgctcagaggaagaagaagcaaggttttctcttcaaaatcgagacctggccatttttatacctgctccgtcagaggtcccgcgctgatcgcgccacctctggcgctaatcgcgccaagcttgctgaacgtgtggcgctgaccacaccactccggcgccaaccgcgccatacttagtgctggtcgcgctaaaatccagaggaaactgatattccagggcacttccggcgccacccgcgcagcccttggcgctactagcgttggctgcaaaactatggcgaccctcgcgccactatggcgcccttggcgtcaactccccgaaaccatggcgccactcgcgccaaaaaccagagaaaactggttttctgggatacttgtggcgctacccgcgtcaccctggcgctgatggcgccatcctcagaactattggcgctgatcgcgtcaaacccggtctactagcgccccaccccagactaggttttctactgaaagaccctggcgctatctgcgcaaaatcctgcgccagttgcgccaggactcagggtcattatatatatatattgtcaatttgtcatactttaattctgtccgagtcccaaaaaaatgaaaaacaaaaatatattttttttcaaaaaataattaaaaaaggaaaatgatgaaatggaaagaataaaaaaaaagaaaaatatcaaaataggaaaaaaagaaaaaaaaatggaacggaagacagaaagaaaaaagggaaaggaagataataaaaagaaaaaaggaaaggaaaataatagaaaaagaaaaaaaaaggaaagaatgatgatgaaacaaaaaaaaaaggaaaataagggaaagcaagaaagattggagtgattttagatttacaaatctctatatctatatttatgacagactttttaataagttcgtaggtcaaacaagacttttaagtaggtcaggccaaacctaaaaaaaaaaaaatatataacaggtaaataggtcttacctgtcctatttccacccttatttacaagtgaagagtatcataacataaatgttttccttgggagggtaataggtacaatccaaagtatacaaaaatacataaataataaaagatcctagactcagagtagttatcactaatctcattcttgcatgtcaaactgacctcaaaagaaaagctatggtgacaaggacgacgaagttgaagaagattatatctctacgatcttcgcatgtgctttcgtttaatcctaaataaaacataagggtgaatcttttagcttcgtcaaaagacacaaggaaggacttaagaaatcaaacacaattctattaacaacaacgatgtggttgtctaccgggtctcacttgtaccctaattatttcccttactatttatgtaatgatttcacactgatcagctccagttgaaactcctagaactcaataagtatacacaatttaaacttgatgactattgggagtatgccctcactacggtacaatggtgggctctcaccaacaagattatgcctcgcatttgtcgagattgccaagtcaacattgtgaaaaatgtgactacaaactcaatgtcacatttgcaagaaatagtaagttagcgagcatacctcaggtatggatctttgtggtcatgtaatctctaaggactaactccttaatcgctctagctatcatgattcgtcttttacaggtccatgtgggcttctctgccaatggtacttgacgacgatcttcaaacaacatatggcccaaacatatcacatagagattcaactcccccactatcacagtggtcaacactcttcggccccgcccctaaaatatatatagctcactacatatgaaggttccacacaaccccttcacatttgtcttttctttgtcattgtggggtttcgctgctccctatactagacgacaaagaactggcccatgagcatttagacctcatatgttgttacacaatcacttcttttagaggacactttcctccatcaccaaactaggtgaaaagtgtcattaaatatccatttcacgagctttaaagttctcacagccgaaaccctacacgactctctttacattatacttttggtatcttcacaatcatagcaatttatgtcaccaaaaggtgagcacccaatcacacaatcgtccatgacatgtaacattttcattaagttttatgtatacctcaccctctcaagtcttatgtgtacctcaccctctcaagtattataattatccatacttaccattgttcctccacgcaaaggtactaagtccattctatatccaaagcaaaaatatagagttcaattgtaataaaattattcttaaaattattagtccacaatctaggtatttttacactctatttaaggcttatttattgtttatcgtcaaaatcactatactagaacaaagttacagttatcacaagtcctcgtactcgagtccttgtgattgcaccacaaaataatcactacaaatagaaaatttcacacacatttgaaggtcaactgtataacacagaaagtacatgctcacacaagtttagtattcgaggttcacactcctctcgatttccaatacaatttaatttaaaataaatgcatcagacacattaattaacaattgcccaaaattcacacttcttgggtctttcatataacataaaaccacaatttaaacatttaatcaaaagtcaatcaaaagcaattaatacacttagtacaataacaattaaatttcatagagaagcaacattaaaattcttaagttttatgaaaaacagaacagaaaaaaggatctaattgaaattagtaaaatgtttttaaaacaaaaactctttacataaaatcaaagttcattgactctgttttctatcttagtatcccaattgtatagcaaaaatttacaaaaattcataaaaattctacaacgtggcaagatagatttgattctagaattaatccagttcaaagatttgcatttttctaacccttcttaaaaccaaattgagttgtactttttccagattcaatctaacaaaatcttattttcatcaagctaaaatttgcacccaaaattgttttctacaattcccagcaaattattttaaagccccttttcctgacttgaaaacatttttccaacaatttttaaatataaaatttgacaaaaggcctaaaaaattctagacacgaccctgtacttaactaacatgaaatgcttccaacttaaagcaatattacgactcctttttcagtgaaatcaataggatttgacaataagttcaaagtgatccagagggtatggtaatcaattcaattgctttggtaaaaataaggtgagtgaagttgagcaaataccatgacgaatggattagatgaaaaaacttgtttaaagtcaaatttgttttgtaaagttcgtaaataagagtgtgacacccgataaatgagaaataactccatacacagtcaagagttgaacataagttcaaagtgaagtggctttcagaaaaaaatgaagaaaataaataaatcttgacttagctaacatcaaatgattctaatataagcaataacactcctttttcggtgaaatttgtaggatatgaaagcttattcagtaggattttagtaagccttcaaggagcttagccccaaaggatggcaagcatagtgccgagaccgattcaatgtccattctaaaataaaacaactaaaatttaaatctcatgtccacagataaaaaaatatattttttattaatttttataaaacaaaaaaggtctcatatattaaaaataatgtgacatatattgacaaagaagacttcaaatataactcttacatttaaattaaaaaaattctccgaaaatttattttaagtcttatttgttgttgtactggccgtggaccgatccatgccacggccaaaggccgacaactgctattagtttatcttatcacacgataattttagggcttaaagagttcatggcctcagtcccatgcagaatagagaaattcttgaacgattctgctctaaactgtttgtcccctagacccgtccctgctctaaactgaacgattcttaatatgttagaattcttgaaattaatgtgtaattaattgtgaaaaattttaactttgaaggaaaggtcagtggtactttattttaagtctacctatttttgtatagatattatttaaataagtgtaatttagttgacaatacaagttaaatttgtgaaaagaattaaattcgattccgcaaaatacatttttggagatggaagatgagttttaaatgtgactaaaaatcaattacattagtgagtatatcacgtgtgaaacaactcatttcttaactctaagtatgtttggatgaagtattttaaaattttaggaaatttaaaattcagggaaattaaaatgcatcaattaaaatttttgtattttcaaaattttgtgtttggataaagaaattgaatttcttcatttttaaaattttgaacctcattcacggaaaaatcaagtaagttgggtggtgtcgtgagagtagcggagtcggagtacgtcgatgattgagacagagcaaaaaattatgcatttagagcttctaaaaaagaagagaatttcaatttctcaccttttagagggaaattcaaattccacatttttagttgtttaaaattctgttttaaaattccaaaaatttaaattcctcatgtaaaagtatccaaacagtgaattttaaattgaagaattttaaattccctattaaattacttttcccaattaaaattctctatccaaacacactataaaagtatgtttgattactgtttcagagtcatcaaaagtcaggttacacttttcaaaacatagaacagagaagcaacaatattgttggattgaaaataaaatgggttacattcagtttgatttgtctcctaaatacactataaaccagtccagaccagttcttagaaattcgaagagaaacaagaaatagaagatgtggttcattccgtgcaagaatctagacatagaaagaaacagagcgcatatatgagcataacttgggcagagattgatacctgaaagttagaaggaaagtttaaggagtgtgatcgttgatgaggaagaacttagagaaccgtgaaaatgaaataaaactggtaaacaaattaaagcaatgtgaacaaaattgaggatatccgtgttggaagattttggtttgattttttcaacaaaagtaaacaaggaaacgggaaaaaaatgaagattaaggttcctcagaaagctcactgtaggtgtcatggctctcatattatgatgggaaatattctagatgggaaaaataattgtgatgttgatgagagaagaaaattgatcaaagaaactgaaaatggttgaaatgagaaaagccatcaaatacatattccattacgtgcttctatatagatactcctggtagctaagctagcttgagtaactaataattcgcataagttacctccctaattaaacttgtaaataacacttagcagttactaataacaatcttgtaaataacacttacccgttaacaaactatctaatagaaacctcattaaagatacccagttaaagatagtcaatttcctaatcaagattagtcatggacaagccacagtatctaattcacacggataacactagaggagatataagatggattgattggttaaggaaaaagaaaaaaattacatatttaatccatcttactaacgaaactaacattttaacaaataaataataataaaaaaaaaaacaccaacactatgacctgatggaaagaaaagttaaatttctagctaaacaaagtatataattcgcatcaattaccgattcaacgttgatgcattcaaacatatacaaacagtggcggatccacgtttaagattgggggcaatgcccccccttaaattttcaagagaaattgaaagacagtcaacagcaaaggaacatcaagaagaaagcttatgcgcaagacagccaaaggagaagccaaaggaggcagctaacataaaggaaaagactggaacaagtttttatttgggcttaatatgggccagactattactttttgtaccccatttattactttttacagtttgttttaaattttctttacaaaaaaaatttcggaagcgctatccccgaacccagtcaccggtgccccccttgattatttttctggatccaccactgtatacaaaaatatacctggaattgccgtgagacatgtttgttgtttgattggcaccggtgtgttgtttacgaatgtttcacaatttgaaaggaaagatccacttctatcaccaagacttggaagtcaggtttggttgttttggtacagaggcaatggcatttgcaggttttataattataacatcgagggggctctaatatagttaaaagaaaatgtacacaaatatcattttttatacgttcgtatgaaactgttgtcgttccaagtaatttaatttccaaagtgattctataatcgaaataatgcaaaaggagtactttctttgtacctctttagatatattatatgtagtggtttgttggtcaaatttattacgcttgtatgcatctaacgtggaaatagactttcacatcattagtcttatttcacatactttctaaatggttagttcattattggattgttttatatataagataaataattaaattcatctatgaaagtgtaagatgtggataaattgattctgaaaaatgaaaattttaaattgaatttttgaatgtgtaaaatgttttgtaaattagtcatatggacaatttaatgataaattagtacataaaatttgcaaattaatgttaaattagtccttgaaaagtacagtttattaaattggtccttgaatattacaacttactaatgaaaatgagattttgttgtacacatcatctcccactcaacgaaaacacgattatattgtacactatataatggaatcgtatttctattttttttccccatgtatgcaatagaaacacgattctattctaatcttttcaacggaattgtgtttccatggaacgggtaatttttggaataaaatgaaaatccacccacgttggtagtttaaatagaacttgtgaaaatgtcaatactagctctccatgttattaaagtgtggcccaacaacgcatttcattctgatttggtgtttagtagagtggtcaaatcagctaggccgaaaggaccataaaactacaaaactcaaatataagacctttactttttgcacttccatatctgtttccttcacttcatattttcattgtgtggacaatattacccttagtgagtctcaacactcccttcccttaaatgtatcccggaagaaaaaaaaatccaaaaacactattttgaaataggtatgtcaaaacacgttttaggatttacaagtctattacggaataaatctagaatgtgttccaaaatacctaactccataagctgaactcaaaaggtttgtattacgtaataggtgttttgtagcacatttttggatttacaattgtattatgaaatgtgtattccataatagacttgaaaatctccaaattgttctgactagaatgtgttccagaatacgtatctcataaaccaaaaatcataagttttgtattacgaaataggttttctgtagcacattttcagatttacacgtgcattacgaaatgtgtgttccaaaatagacttgaaaatctccaaatgtgttatgactggaatgtgttatagaatacttattccattagccaaaaatcaaaagtatttttttttatattatagaataggtgttctatagtacatttttgaatttacaagtgtattatagaataagtattccataatagacttgaaaatctccaaatgtgttatgaaacagccacaccagaacccaacaaccaacactcacttcgcagaagccaaacacccgccaaaatccaacatcacttaccttcgtcggtgtcatgcctagagggtgactaagggaagcagcctgattaagggaagtgcatcacgtgactgaggtaagtggcaaaagagggttaccgaaataaattttggggaagggagtgttgaaagtcattagtgttaatattgtccacacaatgaaaatgaaaagggtagcaagcaagtatggaagtacagaaagtaaatacccaaatataaatatatcatagggttaacccatgaaccatctttaagaaatgctaatttgttaataaaagtaaaatatttaagatgtatttattttttacttaatttttatttataaaatatactcccgttctatactaattgtcattttagatgttttacataggcacaaaattaataaatgaaggaaagagaattacaattttactaaattaactttactatcattaattcatttataatttttgttattattagtattaaaatagatataaatgagaaaaaagtaattaatattacattgaaaaataaatctttacatgataattattatgaaacaaagaaagtattagaatgattaataaaaatatattagaagatataatattattcttttaataatgatattgtggttaaaaaaaattattttgttgtaataatttataattttattaaaacatttgcactagaggaagtaataacaaaagaacatagttgtgattagggatgataaatgtaacatcctgaataattttacttacttaattaattacttaaattattttattatttattttattttatttaatcatttgtcttaaaataaaggtagaaacaaaagaaattaatacagcaggatgctagtatcctatgatggaattagtgcagacctctacgtgtatcttggacgggttgtatggcatgatcattctcgtgtccaggagccgatttaacagaaaccgagccaagtataaaactgtcttaatatggttatgtggggagacctatcatgtaaagctattcttggttggttgagctatattacttggcatgagatgcctacggcttatggttgtggtgctaacccaggcacgtattggtttgagagtagcagtaatagtttatatcaggggaaatttgtaaatagttagcagtgccgagaggtgggtatggcttatggatattggcgcggcagctacctacatggccaaacttattgagatgttatgatgcagtgaaattttcgagtttattcggaccgaggtacctggggaaacttaggtgaggaggtgccgagatcttagtggttatgggtatgcccggattgcatggtgcctgggttgggttcacgcaggtggccgagtttgtttttacaggggtggccgagtatagcataggccaaagtgtacgagtgttggacaggtttaagggattgggtagtgattccttgttccgtgctgaggtgccatgagaggtttataaccggtctcatagaattggggtaagatcgagcttgtatggggcctggtattggccaagatgctgttggaaggcaatggtggggatagaactcggcaaatgcagaggtacactaatatatagctatagacagatattggtacgtaattacttacttggataggccaagatatatatgtatataaataggaagtaaggttacagtactaccatggtgtcgagatgcttccaaatctaaaaccggctgacttatatttatgtatggcatagcttgcatggctaccgggatttatatacttctatgggtcgaggtgtatatactaaagcataattcctgcagtgtcctttattccataatcttaataatccagataataactctttgcttaataagtcaaatgacctcctgtactttcttaaaatattatcgtaaaacttagattattaactaaattaaagagtagatagaaactaacaatcacagcagttaaacgaaactaatttcaaatttagagattgaagcctaacctacctgggatgaagttgatagactgagcagcagcagggataattttgagagagaaggcctgggatgaagttgatagactgagcagcagcagggataattttgagagagaaggcctgggatgaagttgatagactgaggaacagtagggataattttgagagagaaggacttatgtagaagaaggaaaaaggggaagaaaagttgagagggaaagatggacgtggttcttttttttttttccgctggattttactgaggtgcaggtatttatacttatttttttttggttggattttaaaggaattagttaaaatataactggtcatgccttagttttggttacccattaactaagtttagaagatttttattaaaactaatcattacaagtatttacgtggaaagcttgctggatgttggagttccatttggccttcaagagaagtatttctaaagatttagatatagccaaaagaaattgtttacatggctgatctgcacttgattcttattgtaaaaatattcttaagaatattatcaattctattttttttttaatttatatcataaatatatgctggaggttattacaattataccttaaatataaactataattatttattgaattatttatttattgtatatatatatatttatctatatttttttttctaggatgttataataattatatatacttaaagttattacaattattatactataaatgaaatataaactaagagcataataattattctaaatttacgtgaatatgaatgtggatacgtgaatgaatatatatatatatatatatatatatatataatttctctaagaaaaatagttatatttttatgactaatattctaagtttttaatctctaacaatattactatcagatagcaaaaaatcttaaacctttaattagagttttgttaaaggattagagcaataaattatttaacaatcgttatattagaagattatctttataattttatttatttgtgacttgagtttggaataattaatattgtgtttgttttttttaatattatgtgtatattttaacattatgtttgaattatttatgaataaactttttctataattgcagtaattgttttaatttaattttttattactgatttattttattaactttataaataaataaagtacgagttacatgtacatgtatggatatataggtattgaacgagtatagagatgaagattaaaattactacccgggtggatatgagaccggataggaacattattttaaaacaaaaatatataaacgaatattataaaattctacccacactatctattatcacccgtacttgtggtgtgggataaagtatccaaaaatggaatacacgtataaatatttgtgtcggaaaaaatcataatcacaagttgaagaagctagtatcatgatttaggagtccaattcatttcccaaaatgaaacatatttcctatagcaaccttctcgaatcgtggctccagcattagcctaacaagcattcttcaactctctctttcacatttagaagctcaaatctcacgtattttcacacttgcttctcaaatcaactctttctcacaacgacataaatgcttcgcatccccaaacaccaactcacactccattcttctcttataggctaagcccttccaaccctgccatttaatcccctttatttaggagttgtgtggttttgaaagttttaagccctttttatttttgtttcgataaagagactaaaataaactttttcaattattgtggctaaaaatatcaatattaaattttggagattaaaaataaacttaattctaaatttgaaatactaaaaaaatattttaaacctgaaaaaaaaaacattttaaatttatttttgaattttaccctaacaatgaagttcatcacaaagcttcacgatatctaataatcctccttggtcatggtaaattggtccatcaacccaagttattatgggctagcacacgaagccacacaatctctagatggaagctactattctcacctcaaaagttgctatttaacaccttttgtgtacttttaattttttttttctgaaattagcgatacaatgtgattccgttatatttatttttttgtaatccaccttacacaacaaaaacataattctattgtatattttatcaaagaaaattatgattcatgggaacaacatctttttcagaataaaagaaaagtcacccacgtgggtagtgagaattgcaatttgggagttataatagtattttcctccctagctagcctatctcaatggcccaacaattattgttgtcattgctcattgacaaagtccaactatctttgtaagttgtaactatgaatcattgcaaagcaggaaacattatggtcgattgcaggccaacaatagtataaacactatttattgtgtaaagtaactttacactatcatctaatcataaataattattgatataatttttaaataactatcataaaaatcaacaaatataccatatataatagattgtaattcaatggcagtgtaaaattactttacatcatagtgcataacctattttctttatctttctgtcaaaaatcttatttttttatacatttccacacattttccacatatttaatgaaatttttatccaagaaccaacaatcaagaaccttgaaaggtttaggtccccaatcaacaatattattcttaactagctagatttggacaatgatcatgaacatttctatcaacaatatattgtgtactttccgaacatttctattagatgacttaatgtactcacctttctcgtttcaatatatttctatttcacaattttgtacattttctccaattctcctttctctcttatgttcaaccatgattcatataacataatgcatatttgcattctatttgaccagtttaaaatgatgagctcacaaattcgacgtaaatatgatactcattgatgatgtattaatgcattaaataattgaatatctgtgaatattataacataaatatatcttaacttttatatattgtaaaggtttaatacatcactaaattcctaatctttttccaaaaattttgtaattaggtacctaaactaaaataatatacttgcgttttttttatcatctacagtttttgtacttgaggtcctcgaagtttgtaaaattgtaacattgttattttcctaatggttttcaagctgtcatcaactaaccctagtcacctaattacataaattgtagaagatgaaggacctattgatgtagtaaacctattttttttttttgctggcaaatatatatatatatatatagttagaagtctgagtgagataagaagaagtaataaagataaataaatagttataaaaacttctcaacaaacaatagataatgaagaaccaatagaatcattacaaaataacacaatattacctgtagcataaatagaaaaatctttaccagaagtaccaaggcagaattgcagtaataggactaagtggttagctcccattttatcctaaaagaaagggaaaaaaggctataaccaagtataagtccatctagtagccaaccagcgataaatacaatgctaatagtgtaagaaaaactgaataatctaatcatgcttatatataaacaacataaacaattagattaagtgcggaaaaaattaagatcataaatacctcctgccattgctcacaattttgagtctttggattgcactgaagatcagatggtgtatatgctgatgtatataaaatgagttcagggacccaagaaggctgtagacacacttatttatagaccccttgccatcaaagggtcagttacggtgtgctaaaggaagggacgttaacgttgcaaaaaaataggagatgtgggtagtggttagtttcctgaattattgttgaccactattaggttggttacatatatttttttaatttcaaaataaaaaccaacattctcccacttggtcaacatgtcccttaatttacataacaagaaataaaatgcatgaatcatggcaataagtcctcttaataacgagtattaccttccatgtattacaatacattatatcccttagcccatacaacttaatgaataaacccaatgtttattctagatccaaacttaattgatgtttttcagaataaataactgtagatgcgcataaacttaatgaaaaacatcacaatgaaaatcacatatgggaaccaagtcccatctttttcacatgatccttaaatttaaatggtggcatgccctaaaggatcgacaatcattaattcagtgctaatgtgctcaataatcactgtattatctttagcatgttctcgtatggctagatacttaatgtcgatgtccttgcttcgactacaacttttgttattcttagccatataaacaaaatctaaattatcatagtatatcttcaatgacttagaaatggaatccatagctctaagcccagaaatgaaactctttatccatacaccatgtaaggtagtctcaaaacaataaacgaactgaacctttatagtagaagtagcagtcaattgagatctgcctgacacttttccaagacacagctccactagctagcataaaatatatcccaaagtcgattttcttgaatcaatgcaactagcatagtctgaattagagtagtcaattacttccaaattatcagtccgtctatacataagcatataatctttagtcccttgaaagtatctcatcactttcttatgtgatctaaagagtcttaatatataatttaaatgattaaagttgctatggctagactaattaaattataaagatcacaaaatgtcatccacatagagaataagaaaacagattttgctcccactaaccttctggtatatacattgatccataatattttccacaaaaccaaatgaggaaataacatcatgaaacttcaaatatcattgacgggaggcttgtttcaacccatatatagatttcttaagcttacaccaatttctcactattgttagaggaaaatccttctggttgttttatgtaaacctcttcctctagatctccattgagaaaggttgttttcacatccatttgctgcaactttaagtcaaaatgtgcaaccaatgctaggatgatacggagggaatctttcttcgacacaggagaaaatgtctccttgtaattgattccttccttttgattaaatcttttggctacgagtctagctttatatctctcaatgttacctgatgagtctttcttagttttaaaaatccatttacaaccaatggcctttgcaccatcaggcaactgaacaagatcccagattccattagatgccatagaattcatctcatctttcatagcatcataccacaagtttgattccttagaactcatggcttgtgaaaacgtttcaaggtcatttgcggctcctatgttatagtcggattcttgaagatacacaacataatcactaggtatcactgattttcttattctagtagatttccttaatgttatatcacaattatcttgatgaatttgttgctcaattggttgatcaacaatttcttgttcctcgttaacaacttgatctactggattaatatcagcaacagattgtggattctcaatgattggttgcataacacccattggaactgaaggggtgttgtgaacaacaaccaatctcatgcttaaagtggatggttgagcatccgtatgatctttctcaggaacaaggttcccagattgatccctcccactaattaagtcattttcaaaaaatttggcatttcttgattccacaattcttgtagtatgagatggacaataaaatttgtatcccttagacctttcagcatatccaatgaaacacccagtaatggtccttgggtcaagcttcttttcttgtgggttataaattctaaccttagacgggcatccccaaacgtgtacatgtctcaaactcggtttccaacctttaaataattcaaatggcgtttttggaacaaccatagttggaactcggtttaatatgtacattgtcgtcttaagtgcctctttccacaagaacttaggaagcttgaaaatactaagcatactttgcaccatatccattaaggtttggtttcttcttgttgccacacctttctgatctggagaaccagacatagtgtacaatcccatgttcttgaaaaaacttcacaaatagatcaggtgcttgtccatcttcagtgtatctaccatagtattttccacctctatctgatctcacgatcttaatttgcttaccacattgattctctacctcagacttaaataccttaaagatatctaaggctccatacttattattaagcatgtagagatacatgtatcgtgaataatcatctataaaagagatgaagtatttctgaccatatatgttcatatcaggacaacaaatatctgtatgtataatctctaataatttagtattcctcttggcaccctttttagacttgtttgttcgctttcccttaatgcaatttatacaagtctcaaaatcagcaaaatccaaagcactaagtaccccttcatttaccaatctcttaattatctcgatagagatgtgtcctaatgttatgtgccacaacatagaggaatcctcattcataacacatcgattcatgccaacattaacatgtatagcatcataagtggtatcattttgcaaattaatatagaaaagaccatattgcaaatcaatccaccatgtgttatgattaatcatattagattcataataaactaaagaggtaggcatacctttcttttccaaaccatagtttgaacttagaacattcttcatgtgccttttctttttacagaaaaaacacctggatgattctttcttaattccaatctggggtagtattttaccagttcccttgttcttatattttatcttcttgtcatttttctcaattgtcagcagagaactctctccttgttctaattgcaaccttccttcctcctgaacacacatggtcatgagttttttaatagaccatttgtccttatgcgtgttataggatattttgaagggaccatatggtgttgagagaatgttcaatataaaatggacaagaaaagtgtcagacatatccacctccaaagttttcaatttggccgcaatgtccctcatctgcataatgtgctcacgcacaccccttaaagcagtgaatttcattaatgaaaaatctcatgattagagtactagccaatacttttcctgaagtctcaatttgctcatcaatagacttcatgagcactttggcattgttatgctttttcgctgagcccttaataccagcagagatctttgtcttaatgaacatgacacagagacggttggatctctcccatctcatctggttcactgttctcagtaatagctggtggttcaggtattctgatagcttcaacaatgttcatatatcctaaattcaggagaattctctccttccaaattgggtaattgtcccctttcagttcaggaacttcaatagagttaataggttgaatgactccaaaattatatgcttataattaagatttgagacaaaataaaacaataatgtatcatgatttaccaatgtaagtcatgctcaaaattaattatgaatttagcgacataaaatttgcctgtgggctaaaattttaattcaattaaattcatataaaatcatgataaaactatttagttatgtttcctgattcttgtgggcaagttaagaaatataatttaatattttatcctaattaatcatattaaactataatagaaatttctgtgggataatatctattatattatatatgactaattgcaattaatattatttaccttatgtgatctagaggctcttaatatataatttaaataattaaaattgatgtggctaaactttaattaattaaattataaagatcacaaaatattctttcatttccaaaattaattttattgtaattaaccataaacaataaaattaaataatcaatcatttagattaatcaacttaatattacatgtatatgaaaacataaattaatacatgtaataacagaataacaataggtcatgtgaacaaatattacaaaattgtcattagttcaattggcaaaatgctttatagccatttatttgcttacagattcaattctcatctaatgcatttcatgttactttgaattcttaaattgccaagtcatgatagcataaataacagcattagcataatgctactaatactcgttacacaaatcaaaataaaaatgggaatagtaacaataaattataatattatgtctaattccttatatgatctttaaacaacttaatatataattttaattaaattatagatattgtgactaatctataattaattaaattataaagatcacttagacataaaatttaattatatgagaataaatcatattatgcacttcaagatcaagatacaatataatgatgaataaaattctcatatacaattgcataattgaaacataatattatgcacttgatttaatatatatgcatagaataaactcttccataatatattcatgcataaaataaatcaaaattctacaaatttccaaattaaataggaatgcatgaaatgtataaaatgcagaaatagcaagtacaaaaatgtttttttttattattattattgttcatcatcttcaaccttgagttgggtcactttgacccagttgcaacccacggacccgaattaaaaacccaatggttttttagcttttttttaacaccgaaattcatgttttaatttacataaagcttagaaactcaattttcatatgattccaaagcttcttaataattaaaacgttcacataaaatactcatattttaataaaataatatttcacatatatgagtgtcaaacaaaagcaaggcagaggcaataaataggctccaataccaaatgtaagaaaaactgaataatctaatcatgcttatatataaacaacataaacaattagattaagtgcagaaaaaattaagatcataaatacctcccgccattgctcacaattttgagtctttggattgcactgaagatcagatctctcttgagtcttctaaactctaattctaaagcactagctagtgtatatgttgatgtatattgaatgagttcagagacccaagaaggctgtagacacacttatttatagaccccttgccatcaaagggtcagttatggtgtgctaaaggaagggacgttaacgttgcaaaaaaataggggatgtgggtagtggttagtttcctgaattattgttgaccactgttaggttggttacatatattttgtaatttcaaaataaaaaccaacaaatagcaccccaatgaaaaaacagacacaaatgaaaagagaatcacaacaagtcaggcttctttgccattgtcaaaaatccatagcgccattgtcaaatatccatttcccttaactattatcacatgactttggctattagcacctcctcattccctccatatccctttaggctttgtttgggtgttaggaggggaaggaaaggaaatagattcaagaggaagggaggggaaggaaagggaggaaaatgagggaagtttcttccttcttgtttgggagttaaaaatatattaagagagggaaatagagagttaataagatacttttataattttgcccttgaattgtgattcagtgttttgtattttggtgttttattaacattgactggggtaagatagtaattttattaacactgattggggtaggatagtaattttattacttttccttctaaaaatattacttttccttctaaaaaccccccaaatagggggaacaacaatttttaggctttggagtatttcagaggagttttaaaaattatcaaattctttccctcaaaaattaaaactctcaaacaatgagatttctctacctaaacctttcccttccctttcttcccctctaaaatccatctcccaaacaaagtcttaataaacccattataaacaaattaagtcttattttgaaacctttttcttttattttccggtaatgctacttgatatttttttttttggaaagtcttgataggttatacatttgaaaaaagtaatattattaaggagattcaaattaatgaaattcaataaagtaaattaaatatccgttgacatgcatttgcatcccttatcactttattaaactaagtttcattgcagctgcggttggcttgttgatagaatagtaatacatgaacacctcctaatttgaaacacccaactaatacttcttatttctctctctctctctctttttttctcataacatcgtaaatccaatcatattatacttatttttttttctttctccctaggtgttggataatattgtaggtatccatcaaacattttccttcttgatatatacagccacggtatttgtatttgattcgtgcaaagtaaaggaagctaaccaaagtgggaagacaatgagtacaaaattgcatggaagggaacaatctcatcgagcgagttttggttcaagttttaaacatgaaactttatcggttcaaaagagagaaatgagaaaatcaaatctttttatatttcttttcgagtttgtactcatgattcatactcttttttttttctgacttgattcatactttgttatcaacatgaaaaagcgtacgttaccttataatatctatggaaaatatggataattttgacatgatttttttttttttttgtagaagctttgggtagtaatttaatgttttcccttttccttttatcttctctttacgaagggcttcgtatttgggacaagagataatgtaattgctccagaaaggttggttgcatgtgaagaaaattatcgagagaagctttttatattattgtgttcatggtatattgcactaaaataaaaatatcatttgtaatgatttttttttttttgaagaaatcatatgttaatgataaaaattattagttattagttttgggatataatctgttttaattaaaaatgatctgttagtataaatagtacacatttatactaataatatgtatagacactgaagggtcaaactaaataatatgacatatatactgttagtctaaaagaaaataacataccccagtaagagagaactgtttatggatttgaaaccattacaaatagatcatccacatgtaaccttacaattctgtggctcaccttcgcctacagttagtcaaaatatataatattaaactaacaattaagtttctcttaaaataaaactactcacaaaattaagtaagcctaatgataaattttttaccattggtatgtgatattttttgtgttgcatgcttaccaaatatacacatttgttcaagtaatattaatttacttcaaggtattaggaatcgtgttgtgacttagggtatgttacagtcaaataatgccaaagctacgtatcaaaagcttacaaagcaacaaaaagcgtaaggagaagaaaacctgttaaattagcgaaatgagagaagaaaacctgttaaattagcgaaatgggagaagaaaataaagtaacgtgaaataaaatccaagcgtgagaggaaaaggtaaagcctagaaggttgttatttgccaagtgttgagagctaacgaaaactttcattatccccgttattaattacttttaagaaacatagaccagaatgattttttttatagcagcaatattatctgaaaaatgattacaaattataattttttttaagagagcaatattattcgaacaataattacaaattatctgcacaacaattacaaattataaataattgtgcatagactcacacataaatagtttcactcgatcaatatctcgttttgttaaactgtgcgagtgtgaataaattatgtgtctacaacaatgacgtaacaaaactcatttttaaagcagtattaggataattacaaagtcaaaattttgatgttattaaccaaaatcaatagagacagaagatgagtcaattatttgttgaattggaaacaagaagtgacaccacatctttggaataatcgatgatatttatagttaatcaaattctccatttctaatcaactgttgaggagattatatatccaagtcacagccacaccggcactagaaaaatttgcaacatgataatttacaaagcaaaagggacttggaagttgtccagttaaaacctgtccaacacaagagtctgattgatgtagctagcatgagcttgtgctatatatgcagaaattaaaggccctaccaagatccaaattcatgcaaataatctttgaaaagtgagaacaaggtcatgtgagatggtgaagaagtgcacaaaaggaaaggatgagggagtggagtgggtatggagaagacggtggtttgttgggcagctgtctttttgtcttagaattggaggcacgtgatggtcacgtgggtcccccacgaatgtctgtcttcgatccctccaaatatttcatcaacaacaattaattttagcctctcatatagcttctatatatattagcatcaattagatcacataggctacattaatgcatgaaaataagtttttcaaattccaactagaaaaaattgcccctagagcatataacattaaatgcacaaacataggtggatggaaccacactactcggaattatacaattatgaattatcttgcatagtatatggtgctttggtaaattaatagaatcactaattgacaatggggtcctttgtgagggttatggagagggaatgttaatgttatgatgttatgttatccattcacagctaagctttgataggacccaactttttaggttgtgagtgagttaataagatgaattgttggaagacgtggtaaggcattaactccaaaattgcccttatctttgcaaatctaagcggtacccacattctattatacttcctcaaatgggtccctatgatccccaccatccattaggccacacagtttgacaaaggcctcacctttgactacagagaatcctgattgggctttcctccatccaaataattacaatacacactcttattctttaaggtaatggacctttaacaacctaatgtgcccgcaatagtttgaaagggaaaattgaaagcctagtgatcatggccacataaattcaagcaatttgttttctttcaaaacgttctcatcacccaccatgactaatcaaggtgatgttatggcaggatgtagcattgaatggactgatgggaaatgaaatctgggtattactattatccccattatgcctttaaattccttagttttgtagtcaccagttattgttgttgtttcattgatgtaggcgcaataaattctctccttggcaaacagataagaggatattgatgaccccattgcaagctgcaatttgcacggaacctagtggggattgaagaggataagtggcactattacactgaaaggttctcgaattaaattcacacctttggctcaaggaccatcctataaggtgcatgctaccgtgctagtgtaagaaattgcgacagcactgtgtgatcaacccatcatagggaccaaaaacactgtcattatataatattccccttggcattctaattctccagtcagattttgtaataaattttcagtgctagctagctctcatgaactccttccactatatatctacagtttttctccttatttcaaaaatttcttcttgacataatttctttttgtcaaattaagaatattaattatcgaagtaggttctacaggagtagtggaagttaatttgctccagatttttggttatgcacctagaaaatgaagttcagccaatcaacttgtaatatctaagcatatgactaatgtgaggaagcagagctaccagtgcccatgcatagtacccatgttaagggacctccatagtattataaaagatgtctcaaatagacatgccacatggctgtaacaacctagcctatatgatttcgagtcataaaatatataagttttgtaaattataattacgacttgtgcaacatatagttttattatcaatcatatgtcgagcgcttcatgtgtaggtatggcaattacactaccaagtctcgtatgatatgatcatcttagtatctatgaatatgttaaatcaacctattatggctcatgattgttcaaacttcaaattctaagtgctttaggaggttcttattttcaatttgaaaattttgttcacaaaccgaatcagatttgccagaatcctaaactatatatatatgttggctgtgctaggttgccagcgcaagaaacgcaagctacaaaacattttaaattgtaaaatcaagcaaggtctctgaagtctaaaacaagttggtgacattttttaattatatggaaaacaattaatgatcaaatatagtaatattttgtgtaataagccacaacaatgttgatgatagagaatggaccacgtccttcatcgagcggatatattccatctctgactaccacctgtccttagctgttcagcgcacattgtgaccgttttctgttagcactgaaggacgtaatatgattttttggtgtctgatccgtaagcatgtgcacactaaaaatgcttgattccctaagaaccaaagacagagagagagagagagagattagtcaacgttaaacacaattattgttattaatatagtcttagcaatagcaactgttaactaggggtaatgaataaactctaaagtacagcatgttactggcattatcttagtgtattatgctgatcaataaattttctcttacatcctcctttgtgcattccttctctacacactccatttatgagaagaggaaaagtcaaagatggaaatatggtttgcatttatacaaacaaatactggtttagaacgtgaaaaagcgttggaaaagtggttaagcatgcccctggtgcacagagataatttatttaacgaaaaatatcatgtacaattctcgtagtatacaaaatttctttaaagaagtgatagttagagtatcacaaacaagattaatccttaatccttaatctaatgaactagaaaatatcaatgataaaaaaaaatgttaatactattttattaataaattaaggagaaggaacaatttcttttaaggggaaaaaaatggatagaccctaattgattttgaccatgatcaaactcaaatgtgaacgttactcctaaaattgatttaacatggtattagcacacacatgacacgctaacaattttgcatgttattagcgcacacacatacacaagggaagtgaagagaaagcaagtgggctagctaggacgacccacatggcaagccagaactgatcgaacctcatgattctgataaataaacaaaaacatctgacacaaaaccccataagtctacgatatatcatcgaaaacttcgcgtaaatcagtgtaacaaacatgtcgtaacaagatgtggcagctccaatttcggcgtgtaccgagggacgcccccaaatgcttccctcaaatcaacattcattacgcctttggtcactcttcactcactcacaaacaaacactaaattattattattattagtgaaaatacaacgcaacgtttgtatatatgtatttttattgtgttattgtattaaacattaatatattataataatttttaattagaattttgaattttgttctatgaattatacatttcagatggaaaaattttaaataaattgaataacacaactaaaaataaaaataataattggccataaaaaaccgtaataattttaactttgaaaaaatatttttccctccatttttttcataatgtgtctcctggttgacaataacagtttccaaaattattgtcattgaaggaagcatttttaatcaaaattgtagaaagaatggagaatacaataatattgaaaaaaaaatgaagataaaaagaacacaactatgactcgaggtagaagaaacaataattgaatgaaagctttgagaaatagtgcaattatgtttatagatagtgggcatcaagaagagactgttcagttttccatatttgaagtgataaatggttacaatagggtaacttctattggtgagagtgggtaaaagtgagagaaaggaacaaaaatggttaaataaaaatggagactaagtcaaagatttctttttatgtctcatttgtacatgactgttattatttttgttttaaatatgcaaagatatttgaagataaaatgagtaaataaaagtgaagatcaagaagtagttaaaacaatctatatcatttttatctattgttatagattataataaatgttaactaatatatttaggatatggattaaaaaattaaaaagaaaaatatatattttttaaaatgtgtaaaattgtgatatctatgactttatttatattattttatgatttttataataaatattttttaattctttaactaatgctgaaatagaagagacagtgacatatttgccaccttttttacaaagattagctagaatgccacggaaagctaacatttttccaaactgccacaggatcaatctcgctggaacatgttgcgaagtagctaagctgagttggcataacgtggttggccacgtaattcgcatccctgaccagcgaattacgtgtggcaggccgtgtcagatgtcgctggggcccatgtggattccgttaggccacgtaattcgtctgcctgaccagcgaattacgtctgtcacaggtcgctggggaccattgcggattaggtttgtatgccacgtgtcgtattcgtatgaagtcgcgttgggccagagcgaatttaataggttatttagctggatggcccagcgaatttaggaactgattctacttttcgggcctatataaaccaccttccgtttttagttttgccacaagttgttcttccatttttcgttttggctcaagttgttgcttttttagttttcaaatccaaacgcgatttcttgaaaggtcagttatttttaaatgaattcgtctttggaaacacattatcgtaaaagttttgctattattttttagttgaattttctattataaaaacattattgtaaaacctctatctagtaatttttagttgaatttttaatttgaaataacatttatgaaaaagttcttttatattttagttgaattttgaatgtcgacattatcgtaaaatcgctgtctagtaatttttaattgaatttttaatttgaaataacatttttgtaaagggtcttttattttttagtttaattttcaattccgaaacagagtaccgcaaaagctcagttattttttggctgaattttcaattcgaaacacagtatcgcaaaagctctgttattattttttagttgaattttcaattcgaaacacattatcataataggtctattatttttttgttgaattttgaattctgaacacatcattgtaaagctgtgttatttttttagtataattttttgaaaatgagtggtaatggaaatggtttaataaccattgtctattataatggagtatatatgttggacctaatggtcaagtttttgaagaagaaagtaaaatgtttcgtatgcccgcaggatgcagtcaccgtgatttgatgaaaatgatttacaaaaaattgagattacaacacggacaatctgtatctcgattgattgctagatgcgcatcaggcaacccggttcagtgggttgctgttgatattgtagatgatgacgacgtagcattagttacagacgcatgcatatcagacggaggaaaccccagatttatcgaattgtatgcagaattaaattgtggtgcacaatcaagcagtcaacattatgtcgaacccatttgctccattgacattaatagagagccgctagttagtcccgaagacagagatgtatccccatcagtaccaccaatttcgcaaccaacccaacaaatgggttctgaagatggggatataccgttggaaaatgaaatggttctggcccacgacccagcttggcctatggacagttctgaggacgacgtggacgaaggtgttgttccagacagtgactcatcggatacggacgtagacggtgatttcgatcatgcttttccaattccttctccgggcattgtcggaatgcaagacccgcctccggttccaggtatgcatgcacattgttttgttagttagttgtgtattttttattggaggtttaatcacttgaatatcaaatttgttacttaacttcccttatagtgatgagtcagccccaactagctaggttgtcgtgactatgcaaatacataaattatctttaatggataattttgaaaaacattatatgatttgaatgatttattcatttgattagttaccattttcaataaaatgtgtgcatgcatgttgctccactttaatcacttgcatgtgtcgttatgtaggagagggcaacgttccattttggtctgacataggccattacacgaatattaattgggcatacccagatcaagagtctgatgacatgcaaggagtgcgaatgcctaactgacagatgggtcaacagctatataaggaccaggtgtttcagagcaagcatgatgttcaattggcaataaagcattattgtatggccgagcatcgcacaaccgtagtaaaaaaaaagtgatacgaaaaaggcttataatggtttgtgaaaatcattatgatggttgtccatggaggatgagggcatacgaaaaaaagggtggcactgaatgggttgtaggcatatggaacaaccaacacacatgtgtcggtcagaatctttctcaagatcacaaacagcttgactcaaatttgatatgttcgttgatcctaggtgcgtaaaatatatttaattgagcttaaaattttgcttaaattgtattaatgtagtattgtttgacgaaatgcagaaatgataagggaggaccctagtatcaaaattgggttaattcaagaaaggatagcaacagttgtcggatttcatatatcatacaaaaaggcatggaaggcaaagcaaaaggccattgtcaaggttttcggggattgggacgagtcgtatgccttcctgccaaggtggttgagttacatgttgatttgttctcctggttctgcctacaagctagatttgaatgaccattttattgatggactactcgatggaagtgctaattaaggtgttcaagagggtgttttggacatttaaacagtgttgtgatgcattcaattattgcaaaccagttataagcatcgacgaaacccatttatatggaaaatatcggggaacgttgctgattgcaaccacagttgacggcaacaattatgtccttccacttgcatttgctattgttaatggggagaatatcgacaactggtcgtggtttttagcattaattcggatacacgttacgcagaaagacggaatttgtcttatttcagatcggcatgcgagcatattcgccgcggtgaacaatgatgaactaggatggaaaccacccagggcataccatgttttctgtgttcgccatctggcgagtaattttaatcacaagttcaacaatgtcatgttgaagaagcaattgaagaaattaggtatgtgcgcacattagaagagaatgttattacatccacttactccacttgtcttatgtccttttttgaactcgtgtttttatttgcagcttatacaacgtcgcgattagattttgatgccggattggaaacatttagaggatcaagcccgcaagtagccgcctggattgataatatcccaaaggaaaagtggagtatagcttacgacgaactgggaagaagatttggtcacatgacaaccaatctttcagagtgttttaacaaggtacttaaaggagccagaagcctacctattacgtcccttgtgcggttcacctacgcttgactagtggcatactttgtagcacatggtgaagaggcccgtcaggagatggcgagaggtaaccatttgtcaaaattaggatggcaaaaatatatggcgatggttgataaatccgcaacacactatgtcagttgttatgacacacttaagacaaggtttgaggttcaagagacgtacaacatacggactcatagcggcggtaagaaatggacggtgtcattaggtgaaagatactgtcaatgtggtgagttcattgctttcaggttcccgtgtagtcatgttgttgcagcatgtcgatccacacaccacgatctcaggcaatatgtggaccctgtgtatagtgcggcgtatcaatgtcaagtgtatcctccgcagtggttcccaattggaaatgaggatttcataccaccagctgcaccgcccatcgttataccagatgtttcgctgagacgtaaaaaaggaaggccaaagagtacacgcatacacaacgagatggattcgcgtgaaggattgacaactcgaacaagatgtggttattgtaaggttgtcggtcacaataggcgtaactgtcctacacgcagtcaacatcagtgatgtactacgtggttatagtattttactacattttcattaatttaaaaaacataaaatatgcattcaattatagtccattgtcctgcatatcacatcaaataaaaataatttaaaactgcatcatagttatcattttacaaattaaaaataatcattcatcctctccggggtctgcatggtatcctcgacaacgcctcatgttatactcgtacggtgacagattgcatcgaaaccatgctcccctaaccggatttcgcctaatgatgtcagggtcatcatgacggtgctcatcgttgtcctcatctgccccctcaatagccgccaaaaaattaaagcatacaaagtagtaaaaaaaactaaccctacatatcctctaacctaatattttaaatttgtaacctaaatattatttaaaaattaaaattatctaaatatttaatatataacctaaatattatttaaaaactaaaactacctaaataattaatttatacaaaatttaaaatacaaaacgctcaattacaactaattaaaacataaaaagtactaaaaaaaactaatcccaaatatcctttaacctaatattttaaatttctaaccaaaatattatttaaaaaactaccaaataaattaatatattcaaaatttaaaatacaaaatataaaattacaaaaaataaatacataaaaattagtaaaaataaactaatcctatatatcctctaacctaatgttttaaatttcctacaaaataatatttaagaactaaaactacctaaataattaatatatacaaaatttaaaattcaaaatactaagttacaaaaagttaaagcataaaaagtagtaaaaaaaaaaaactaatcctacatatcctctaacctaatgttttcaatttcctacaaaataatatttaagaactaaaactacataaataattaatatatacaaaatttaaaatatacaatactaaattacaaaaaattaaagcataaaaagtagtaaaaaaaaaaaactaatcctacatatcctctaaaagaatatcctctaacagaatgttttcaattttcaacctaaatattatttaaaaaaataactaccaaataattaatattttcaaaatttaaaatacaaactactaaattacaataaaacgaaatatatatcctctagcctaatatttttattttcaaatctacaaaattcaaaataaataaaataaaacggaataagtaaaaaaaagaaaaagaaaacttaccaagtaacgtgagggagcttatcaattacaacaaattaaaacataacaataaaaaaaaaaactaacccacgtatcctctagcttaatgttttcaatttctaatcaaaatattatttaaaaaaataactaatgttttcaaaatttaaaatacaaaatacaaaattacaaaaaattacaacatgaaaaaaagtaaaaaaaaaactaatcctacatatactctaaactaatgttttcaattttcaaattaaatattatttaaaaaaattactaccaaaataattaatattttctaattttaaaatacaaaatacaaaattacaaaaaattaaaccataaaaagtaataaaaaaaaactaatcctatatatcctctagcctaatatttttattttcaaatctacaaaattcaaaataaataaaataaaacggaataagtaaaaaaagaaaaagaaaacttaccaagtaacttaaggagctgatatgtgcgagttgagggagctgcgtgagttaagagagacatggagctgtgtgagttgagggaagcagggagggaaaacgatggttatgtagtgggccaggcagtgtaattcgctggaggcccaagcgaattacacatgccacgtgccgtcacctgattcgtctacgcataaatcgctgtaataaatagcgaattaacaagaatgcaccacgtgttgtccttttctgcacagtaaacgggaacccagtatacggaattcgcctgtgagagtagcgaagtagcttccgtggcattccaggatatatttcatcaggtgtggtatatagggaaatttttgtaaaaacagtggcacattggccactgtcccgaaatagcacccgttaatagtatcctattattaattattgttattatagcatatctattctaagttgcaattatgtgggaaaagccatgccacaaggttctagaccttgactcacctcacatgctagtgtatgcctaaagttaagtaactacaagttttccttaacccgacgcgtttttgttaaaagtttctttgaaaaatatatataaaaaaaaaacgtaactagtagtttgggtctaggaatgtgaagtgacgttgtcagttcataaagcaactgacaatgcctttattaaattcctcccccctcatgttcaacataatcagggaatgatttaaagtcaacctctttgatcttgcacgtcacctttggagattttaacataagttgcttattgttgcaagaaatagtataggataatagtgaatttagtaaccgcttaaaaagaattgcgtaaatttgcttatgtttacacatgttagtgcacgttgcttatttttgcttgaaatgttgtgaacttacttaacttcatcctaaagattccgagggaacatggttttaaagaaacaaattaagttaatgtctctatttaattttcttcaagaagacagtgaaattaataggataattatttcttctatgattaaagaatttttttagtagtattataatgaatgtttaaatatgtttttaatccctgatatatatttgaattttgtatttgatccatcataatgttttcctttgagatagatccctaaaatttaaaaagttttatacgagattcctgccattaaatgagatccggtaactgttaatgtgaccattaactcgatacgttagtaagctacctatgatgccatgtcaaattaaatgtgatatgcaagatgaccaagtgtcatttgacatgacatcatattttaattaaatttaaatgaaaaaaaggtgggattatgaaacaaccccaatctttctcttcactgaagcttgggtttggtggtggaaaggagtgatctttccaaatctctctctcgaaggttgaaggtgctaatagtttttgcggtgttatcaaacttgtgcgtcgtctcctctgttgtgtcagagttctcaaccagtgcacaaccacctctctcaccaaccctattattggtgcatactactagtagccccaacgccccttcgtgcaactccacaaccaccatcagtcgcagtgcctgccacccccatcttctgccgcaattgcaaccccaccacatcggggagggttgatgggttttataatcaagggtttaaagggaacgaggtgggtgccaaaggtgggattagggaaccaatatgggaatttgagtgaaattaaggaacatggtgggaatgatggtgctgcgttgcaggggattgcacatcaaccacatggtggggttgttgggattgtgggaaatgagggtttggtgagacaaggtcaaggtggtgttagtggtggtggagaaggaagaaatgttattaatagggttgttggaaatggtgttgggaacaatgtgagtgttgttagtagtgttaatactggcagagttagaggtgttgttggtgatggtagtgtttgttgctgctagttctggtggcactatattgtttgtgggtgatttgcattggtggactactgatgctgagcttgaacttgagcttagtaagtatggtcctatgaaggagatgaagtttttcaatgagaaggcaagtgggaagtcaaaggataattgtcaggttgagttttatgacccttttgctgcaactacttgcaaggaggggatgaatgaacatgtttttaattttaatttaattttttcctttaaatttaattttaatttaattaaaatatgatgtcatgtctgatgacacgtggttagcatacatgtcacacttaatccgatgtggtactacaagtagcttgtcgacgtatcaagttaatgaccaaatgagcaattaacaaattcctttaaatggcaaggacttcatgcaaaattttcaaattttagagacacgtcttaaaggaaaaatttatgagagatcaaatacacaatttagatatatattaaagataaaaatatatttaagcctataatatattcaagcgaattcataaacaaaagattgcatcaacaaaaccatattgtaaatgtgctaaaacaactatagtttcaacacaaattaacaattgcatattgctagtatttcgattacaaatgtcatatataaagtgtttgttaaaaacaaaataattttgagttttttttttcgttttgttatttacttatttatttaaaaggagaatttagactgaatatgattttaagaaaataagcttttaaaaaggtaacttttttcagtgaaaggtttgaagaaagagattttacagaggttacttttaggagctttcgatttttactttttacttttctccttttcaaatttcaggatttaaaaacacactaacaaagacatttttctttacaaataaattttttaaactttaagaattataaaattatcaaacaactttaagtttaaatataacaaattttaaagtcttaattaaaaaaggcagggcaaatgataattaatttgttgttatagatattacaagtttacaataaaaatatgataataaataattctgttgtataaaaagtaattttaattatataaagatatattaaaagacacaatcttaatgcttatttaagattttttgttgtacatcattttttagtatatgttgttttaaataaagtttttaacatcattacttgtttgttattctgaagaggtcaatttaaactcgttataagaagtaacctttataaaaaaaattgaatcaacgattacaattgtgttaaaaaagatgttatcaacattctccatcattagtagttttttttttataggaggtaagcaagaaaaaaaattgtatctgtcgtaagctgcaaatgatatccaatgaagtcgaactagctagtggagcacaaaacaaaacccacaacaaacacgacagtgaaagttaggttatataattatggaaggtttgaataaaagcacgtttctgtttcacatgtaatcagtgttgcttctccgctttggccaccattaggacatcatatacggacattaccactacaccacgtggcccctatgcaccctttgtggcttactcatagatttcgccaccccaacgtcgctacttcaaaacgtgtttttggcaatgttgtgtaattacaactcaggaaatataattaagctacgacctaccatgttttttttaaactatctgtaatattgccataccaagtgatcatgaacaactaaaaaggctgatattctttttataaagattttttttttaatatttggagttatgcttaaattaatatgatggctagatataaaaagatgtccaaacaatgaagtctttttttatttaagacaaaaatatatcgataaaatatggagtacaaggataccccaatccgaatacatgtacatcaatggggtacttgtttttatattgatgaaatgctaagactcttgttttatataccttagaaaatagttacaagttcaagaaattagaactaacttgttccagatcgaaaatcacgctcaccaaatataatttttctcttacgagtattctcattagaaaacaatcttttctactgtatagcagatgaattgatatagagtgagtctagtttaaccaataatttcatttcagtagttgggtatgcaattagtttgactcttgagtattcgtcttaatcagttttttttttttaattttttttatatcttatcttatatatctaagaagtttaaattcaaaaacttacttttgaatcaaatttaattttattcggactaattagtaaataataataatttaaattataacaaaattagaacataaattatgcattatacgtagttgtttttatgcattatatgtgtttacgtatatatgcaaaatgtaagaatatatatttcaaaatattaggaaattattttaatcattataaaaataaatagaaatataaattataaacaactaaaatttaaagctgaataaatttaatttttttatatattgaaataatattttaatgaagattttaaatatccttttatacatattaattaaaaaaattagttaattattaaaattaaggaaaccataaaacacattcgattgataaactaatttaaaagacaacaaaaaaaaaattgtttcattcgattaaatagatttttaaagttgaaattgataatatatatagaaattaattatttgacttaaatatacattttatccttaaaaatttaatgttttattgttttattctatatttacaatgttttatccaaaacaattatatttacatcttttacttttctgttaaatatttaaccaaaaaatgatattatatgtgcaacataaaataagttatttttggtaaataaaacaggatggaaaataagaatactataatatatttaacactaaaaaaatatataaatattttatttttctttcgatctttgataaagaaaaaaattaagcttgatacattcttttcttaaagatttttactgtgtcaactaaatataaataattttggatataatttttaaaatgattgtaacaaaattcaaaaatcttaccacattctctatacatgataatttataattggatgataatataaaaaatttacagcctatcaatagattataattatatttaacacataatattaaatgaaaattaaattaaggtaactttagcattataattgttttcataaacatgagtttccaaaaatccttttaatttattttattttcattcctctaaaacatgaaattgatcattatattatgcttttggcaaagacgtggttgtggcaaggcggccattgtcttgtgctcccggttgatttcctttttttgtttttttgtttttaacaattttatttattaggaaatatattttattatttatagttaatttgttacaaatattatacaacttaaaaatttgtatgttcttagatattgtagtaaatttcctaaaaaatgatattgtaataaattattaatgtgagaagtttattacttactcatttaaaaagtcacaataaaagttagattacatttactttgaattaaaaaaatccttgacataaatatagagattaaattttataaaatataaaaatatcataatgaagatgatcaatagtgatgaaatcccacatttaactaatgattaattaattttttttttcttatataaaagaattattttcttcttttgaattccaatagttgataatacttgaaacagattaaacttttataatgagtattaatttgatatttttggtattgagttttttctttaaatttaaaatactaaaataaatactaacaatatacattaatgtcttcttaaaagtattaagctatattaaaaaaatgctttttaaattaatgtatgtattaatagaatactgttagtaatacttgtaattattatcaaaagatttttttaaatgaaactttttactttcaattttagataaattgtgttgcaagataatgacttaatgaataaccattgagtcagatgtattgaaattgtttgattattaaattttaaccaatcattttatgatcagaaaattaaatttagaaaaataaatgaaaatagataaattgaattggaatttaaatataaaatttgtctaagaactcaaaatttctagacctcagttttgattttcagttcctatataatttttttcagtctctgaaaaagatatattgattatcatccctccaaaatttaaaattattatttttaatccgtagtattcaatttaaatccacactaaaattgtatgcgagtatatgtcaaatagaattatatgtcgatggttgaaggaagataggaattatggttcgaatttctttcatgataaaaaacttaataactaatatttatccgataaaaaatgtaaatgcagactaatgccataataaattaacctcttaggaaaaagtatattacttttaaccatgcgttattcttttaaagcaaaatgtttattaattagagaatatgctgatgaatgaagcataaggaatgctcatcgaagcaccaggaaatgaacaaattaaatatacaagagttgctgcacattatgccgatatactttttaaccatattgatgattgcatcctaaagcatttctaaaagcctttttcccacttacaatggtccgttctgttatgtctacacttaatttttgcattgtaaaaatatataaatgacaaaaatatgcatgtgattgagcacccaaggtcatgcttccagatgtttcacttttgtaggtacttttcaaatgtcaattgttctcacctgcccttcctaacctccaatacaaaaattaatgctgcgatctttgagtaataataactaaaaaaaatattctatttccaaagagtaatgataccaaatattagcatgcatgaaagatatatgctacgtcagtcaataggaacatgaagcaacagattgaagtcaaacccacaaaccacagttcagcttgctgataatccaagttcacatgcatcggtccaagttttgggccccacacaaaattttgcatcttctgggaaataatgaaaaatcagcctactaagttctaatattttaatcatcctacaaaaaggtgctgtcaagccaaattttcaaaaaataacgcggcaatcctgctgtgtggcagtttctttcaattataaaacagaagtttagataactcttcattctgaattatcacatgtttggtatggaaaaacttacaagttattacaatatttcgttttttcttttctctttgtttcactgtgcaatatagagagagaaaatttgatagattaacatgatccatatgtgaattcattagtgggagagggacgtaattttatataatttcatctaataattaactataggtttcaggttagcagagataaattaattcttctaatttaaaatatataatttttttatgtagaaatccgaagcacaaaagtttataaaaaatataaaatcaattaaatcaagtagaaagttggtaaacttgtggattctaataatatttcaagttgttatggcaagttgtttaatctctactacacagaataggttttatgtcattattataatcgactttttgaaaatccatgtaacaaatgatatgatgcaatttttgtaattacctataatttcacaatatcgattgtttataaattgagtataaataataattttacattaatacatgtttgaatccatgttgaattagtaatctaacatcggtttaaacccgaaccaatgttgaaatttaattctaacatcgattcaaattagaaccaatgttgaatattttccccctctcatacttatttgaactcccaaccctctccctctctcacatatcctatagtttctctctctggtattcgccaccacaaacccaaaccaccaccttggccctgcaatttccatcaccatgtcacctccaccacgaccttgttaccaccacaaactcaaaccacaataactgattaagcttcaatcatctcatcttagcattttggcaaaaaggaacactcctaacacttcttcctttggcacgatggagtcagagaatgatgatggtgtgactagtaatgaagatttattgcttgatggtcgtgagcttgagagtgattactacttgagtagtaaggacaatgctaaagatgataaagtgagaaaaataatattgtcaatgtccataactacccaagaggtctaacatgatgtgtgtgtgtgtgtgtgtatttgaagtctgtagttgcttgagaggtccaacatggtcgtgcatgtcaaacatgctaagctgaggaatggagtgtctgcattggattttgaccatgctaacacaacgaagctccttttacaccagttccggaacacatactacattagttttagaatcgatgttgctcaacatgatattaaatttaggcgtattcaacatcaattccaaactgatgtagaatcctcaaaatcaacatcgatttctcttaaactcgatgtaggaaatgggacatctacatgaatcaagccacattcaacattgatttattggcaaaaccgatgttgaacttttctcctattacatcagtttttgctagtttttttatatataaaaaaataaattgcattatgttttgtgttcactatcccatattttatacctgtaattatgtatcttattttacacattgttacctatttgttagttataggttcaatgtcttgagtaattacatgtgattaaaaaattaattgagtaatcaaataaaagattgaaaaatagagaaaattagttgttttagtaatggttaagttgaagagtttacaatatcacttatatatttctcagggattaatttctttaactattgtttgtaattaatttgtttgtgattgaattgtttatagaatgtgatttgattaaaaatcatagtgtttatttatttattgtgtgcaatgttttattttatatatgaggtttcaatgtgtagttaaattgttttgtttgacaagttaatttaagttactcgagttttaagtgtttccaataatttagtactcagaaaattttacctgaaataaatttttacagataaaattataatgtatcaactagtataaattttaatttttgtgattaaggtgtataaaatttagttgcatcacagtataattatgcaatgtaaaattacactgcataactaaatcctctctcattgacaccttgcttttcagtaattctccctaatccccacaaagtaacacttaatcccattccaccacccacttaaaccaatcaaaaagccacccttcctccctaagaaataacacacatggacacaacacacaaacttcatcgtcactcatttttctaatttgaaagttcacccacactctttttctctttctcacaccacaacacaaccaacagtgcatgcaagctttgtggcagaaaatgggagcttgagagggaggtgaaaacgtgagggaggaagaaagaagtttagcagtcgttgttgatcaattgcatgcaaacttgtctcatcaccatcaccatctttagcttccatttcaatctcatcttcattttcttctttagaacaagctataggtaaatggggagtcctttgtgtgaactcaacccttggttacctttgggagggggtaaccatggatgaatgatcctccattttaatttctttcacaaaaaattggtttttgaagagaaaatgcttgcatgcatgtttttgcttctttctttttcatttgatttttatttaggagatctccaaatacaaaggagactctacccaattttgcccaacatgtttacacaaactttgaattcaaaaaattgagccatgatgatgatgagattggccagaaattgggttttttggaccagtctctgttttgaacttatcttaaaatctacttgttggtttttttatgaaattggtctttatttaaactataacaaattttcaataacttctctgttggagaccttgtagatgaagtcatattaaggctcattctgaaaacaatatgaatacacccaaatatcaagagaggggatgaattggtataaacttgaccttttaaaagttttacaaaatcaaagtagaaggatctttatcactttttaaaatcaatgaaacttcaattcaaccaaaccactcagtccaaggaattaataacaaaatctgcactttttgattaagaaagaaatcacaattgtcaagagatcaagataacaagaagagataaagagtataataaccatagaaaaaaattaatttattatatttcatcacaaaaagcgttagcgacagaattaacaacagatttagcgacaaccagttgctggcgccgttagcgtgggaagtggcgctgttaacgtgagattgcaccagaagggttttttcctcgaatttcttgcgcgattaacgccagacttgacgcggttagcgctagaatgcacatggaggctatttttctcgaatatctggagcggttagcgccagagttgcgtaattagcgctaggaacacttccagactagagaatttggcacgaatagtgccagaatgatgctattagcgtgggaacacgggctgggggcctataaaaggccattttttacgaattttctggccaaaaatgtttcttcttcctcccgctgatttatgccattaatgaagtaggaagcttcatatctactccattcttcatctaaacactttccacccaactagaaagttgattagaactcctctatgagctagattccaagatcaattcgcagagtaaaccatcaatcgaagagacctagttctttagggaatttctcaaagctgagattttggaagggaagaaggcgattcaaggatgctaaagcttagaaagtgatcatctagccttccttgactgtttagaggtaagaaacttaagttttgccgattgatttgtgaaattgttcttgggatgaatagtgacccatttgtgttagggctgaaattaggcttgggccctttagaaaagtatgcttaggaggttgttttgatgaagattgaactttgaaacatgacttttgatgaagtttgattttgactctgaagtatatatgagtaggaagaatgttgattaaatggaaggtattatgataaatatgagcctaagtgcttttacaaaagttgttcaggaggctaaataaaatgtgaaaacgtgttggaataaccattttagtcaagttggataatcattgatatatgatttgtttagagcattgaatttactcatgcagggtcttagagcggttttagtacctttgttagaccgagatagatcctagtgaggatctgttagtcaccaaaccattagagacttgagatcgagtaattaagggttataatgtaaagaataatgtttatgttcctttttaacggttaagaaccgttattgattgattgtgtgtctttgtataagacaggacaccaagggtgttagtggcagagaccacaatccagggattggacagcagagcactaccttgccaggtaagctctttgttcttgggagtgtttccattgtctgtgttctaccatactccaagtgagtgatggttattgtatgacataatgcatgtatattgaaattgtgtgttactgttttattgaaaacatgtatatgatgtacactgtgatagtgttgtgtgattgatgagattctctggccagtagaatggaataaatatggacttcccttagagccagagttacgtggaacaactctaagtggtcaatatatgtatatgtgataaaacctgagaggaatgtacccgtcgcggatgatcttctctcggaagtgccatatatgtctaaataagtcctgggagaatgtgcccgttgcggatgatctttcttaggcaatacgatatatctgagtaagtcctgtgagaatgtgcccaatgtggatgatctttcacaggcagtatgatatattgatatgtatatgttgtatttgtgtgataatatacatgtgatatgttttgagagtcgtgatgactggattgtgtgtgatgccaattttaatattatatgccatggaagtgaatcagggggaggagagacctccaaggaccctgattttactgagattgttatctcacccctgttggggatcttatttttacaggtgttgcatctgacagagatgataggtcccaggacgggaggccccagtagggacaagcattgtaaaactgcttgggcagtgttttgagagctctaaggctcactgttgtgtatagatatatgtgatgttattttgtaccctcgtgtgaggatgtgatttgtgagatcatggcaatggatgtctattatttttgtataaccacagtggtggttgagatgatgtatatgtatacccatattgagatatgtggtttatattcctcctgatatatctgtatagatattgttgatggatctgttgtttctttatgttatctggatcgaaaggggctagttgtagttttgtggcattcgtttatacttcgtggatatgtaccatacataatgaatcaagagatatggttatgaaaacacttcaaatgatttaaataattgtttttaattaattactgcgctaatctgattaagtaattgttaatacaccggatgcatacggggtgttacattttatggtattagagcagtttcttgatggaagcattatgtatagtaattgtgtgttgctcattactgttgtttgagtttgccatggctattgcatgtgtggacactagtggtgggcctgatcaactcattgttttggtgtacaagtgcaatgtcatgatgagatcccgaaacaacagttgggcaacgaatgccaagcctgatccaatgacggctgcgttggcagccatgcagcatgagttggccgaaagtaggcagatgcaggaggttatgcagcgcaagatggctgcaaaccgtgagatgaatgaggctttgatgaaggctaatcaggagatgcttgaggaggtgaggaccttgaggagagatgatagagtatcctctacacctccaacgcatgagggcaagggtagttgccagcaggttgggggtagccacctgagaggggatctggtgtcccatgttgaggctgatgttgaggttgtagtctgagggaagatgcttaccacctttcgtaagcatgaccctccagttttcctcggaggatatgatcctatgactgcagctagatggttgtaggttttagagaagatacttatggcatgatggagtgttttgatcaccagaggttgttgtatgagacctatctgcttcagggagatgtccactagtgatggatcaccacgtctcagttgttgagaggccggggtgaggttatcacctagcagacttttgaggcctgtctcctggatagatactttccagggatgctagagagcagaaacaggcggagtttgatagtctcattcaggggagcatgatagtggatgagtacttggctaagttcaattaattggctaagtatgtgcatttcaggagggctctacctgatacagaggttcttgcagttaagtttcagagaggaacaccatagagaccagttccacctcctaagagtactacttgtgggaggagaggaatcatgacttttgatgaagtttgattttgactctgaagtatgtatgaataggaaggatgttgattaaatggaaggtattatgatagatatgagccttggtacttttacaaaaagtgttcaagagactgtatagaaggtgaataagtgttggaataattgttttgggcaacttgtttatttttgagatataggatggttaaggcaattgtacgctttgaattagcttatgcagagtcttagaaagactctaaggtattggttagaccgagataggtcctgttgagatctgtaatcacctgttaggtgactagcccttaaaagcttgaaatagagtaacaaaggggttgttatagagaatgataaatttttttttagcggttgagaaccgttattgattttggtatgcctttatgtagggcgtgataccgaggttattggtgggtgtgaccacgaagccgagagagccagtgtagcactcagagcaggtaagctctttgttcttaggagtgtttcccattatctgtgttccactatactccgagggagtgatggttattgtatgtcatgatgcatgtatattgaaattgtgtgttactgctttttattgaaaacatgtatatgatgtacactgtgatagtgttttgtgattgatgagattctctagccagtagaatggactaaatatggacttcccttagagccagagttacatggaacaactctaagtggtcaatataagtatatgtaataaaacctgagaggaatgtacccgttgcagatgatcttctctcagaagtgccatatatgttcgagtaagtcctgggagaatgtacccgtcgcagatgatctttctcagacaatatgatatctatatgtatatcttgtatctgtgttgtgatatacatgtgatatgttttgagagccgtgatggctagatgatgtgatacaaattttaatattatatgccatgaaagtgaaccagggggaggaaagacctctaaggaccatgagtttactgagattgttatctcacccttgttggggattatatgttttgcagatgatgctcagggagcggatggtggatcccagggtaagaggctcgtgtagggataggttctgtgtgaaccttaggcatatattttgagagcttgttggctttaagttttgtttatgcttgttagtttgtaccctgaagggagtatgtacagtttaatatatatacatatatatatatatattgtatattataagaattcaccatatattatgtacaatgggtattgttaatgatgtgagataacgtcattttgtttactgcttctgaattaattatctttgataattactacgcttcatggccatagttgaatgttaatgaactggatgcatactggtcgttacactttacttaggaaaaacacttatgcaagtttatatatttcataattcggatatgtgttatttcttttattgcacttctattaattttgaagtaagcttctaagcaaaattaagttatgtgtttttttttttttttgaaaatgtgaacgagttattttatttattacttgatagtgactttagaaagcaattaattgaaatttttaaaattcacaaaaaatttatttcacgttttctaatttttacatgattttgaaaattaaatggattaacacactttacaaaataaaaaaaatgaattaattaagatataattgcattcttagaatttaaggtattacataaataagcatagtgctaaggaatatgcaatagaacaatttacttgggagaaatgactatgtttctcctcaataatttttttttgcatatcatttatggcttgtttattttcgccttatccatgttgatgtcattcaaaaaactagaacaagctttagaaacaaagaaagagcaatgatgatagatgaaaacaacattataactcaagaaaaccctaaataacattcaacacttaaaagaaatcaattaattttagctataaaagttttcaaaatcaaatttttggcttctcatgctcaatatggtcatggtgtgccatttagccagcacaagttggcattgatgtaagtttcaaggacgaagagaatgaaatcaaagataataactcattaagttatacaaaatggtattagtgacaattgaagatagaaaaaaacctaacacttggtcaaagtgcaaacatccattctacttttcatgtcaccaacatcatttttattattgaatgatatcaatcttgaatctattcgcattccccttaacatttacaacaatacccactcgtgatgtctaaatggcacacaatgaacatgtaaaacatgacaaaccaacaatttgtttttggactcttagagctacaaatggttttttaggtagtgtatcacatttagggctttccacaccttacattgttattttcaagtatcctcgtagctctttctatgttgttgaagcttgatctatctagttattgaatgtgcataattgacaaggagaaaatatgtaggtcgtaaacagcatgcaacaaaacaaaattatcaaggagaattagtcatttttcctcaataaatttctcttgttgcatgttgtttagtgctctaccatttccaccttatacatggtaagttcattcactcttttaattttgatcccaacaggaaggacctaaaaaaatccataacatcatatttttcaatattacacaagatagaaaaaccacattatttaggcatatacaaaaacaaacactgagcaccaaatcacatgaaaagacacctaaatcacattatacatgatcaacatgaaaatatatagagaaaacacgaagccaagccaatcctaaattgaaaccaacccaaccaagcattaaactatcaaggcttttaattaaaaaatcaatatatcaagcaaaccacaaattaacaacaccaattaagtattaaaatagatagaagttagacataataaccaacatcaaaatagatccaatcacacataattttaacaatagaaatcacatattgttagaaccgagcacgacaaggacaagcagcacaaattaccaacttttgtacatggtcacaaggtgactgaccaaaaacaagatagagactaagataaagagaagggtgaaagaaagatgagggagaatgataaggcatcaacctgtgcaacaaaggttcaatagtggtggaagcgaggtcatccttgtgggcgtgtgcaattgcaagaattaaggtactttacaagagagcgacgtagtagagaatatagactaggttgtcaaataggtttgtggtgatggtatgggttcatggagatggcaaggttatggtgggagtgtttgggttcattgaggcaacaagtttttaggtggtgacactactagaaaataggatttttacatcagttgttttcaactttcaacatcgatttttaattgatgttgaaatcatcgacgttaaaagtatcaatgttaacatcagttttcaaaaactgatgttaacatgcactacacaacattagtttttaagaaaaccaatgtcatataataagaaataaataaaaatgtaaaatatgcaaaaatcaacatcaattttagaaaaaccagtgttgtgctacacacaacaacatcgattttaccaaaaatcgatgtggaaaagacactatttacatcgattctattaaaatctatgttgaatagtacttaaacatcggttttgtctaaaatcaatgtagaaaatatagtttccacatcaaccaacgttgtgtagtcactttctacatcatttattacataactgatgtagaatataattttttttttttaaagtatggcctattctctttatttctctccctataattttaaaagacacattaaaagcttaaacaaaaattttaatgtacttctattaacaatatttagtattttcttatatcaacaattaataagctactttttagggtattttcttatatcaacaattaagcaattgtatctaataccgaatccttttctccttgaaatgtttaagataaaatagttcctcaatgctcactataaagtctcttatattgagaaagtctcttatactatggattacaaaatataatccaacattaactgattatgatctaaggaaacatctatgtaataagcccaagtggcaagatgatgcaaataatgcattatagttaattaaacactcaccattttatcatcattacttctactggatattccaattgaaccttggagaatagctagaagcatgtcatgaattgataggatcaaagtcttagtttttgccatatttaatcatttgagtccagctaatgccaatagggtagcttggacaatgtcctccctgagttttctcagccttgtttggacattaccatcagaaattttcctccacctaagattaaaattataagttagataagaatcattcactggtccagaaaaccaaattgtcactaatgaagtaattagagaacaattaaatgaaacaagacataaaaaggaaatgttaaagaaacacaatcatacaaatagaaatcatataagaaggatagacttttaagaagacacaggtaatgcccattatcctagtataagactctcaatcatgacactgtgtatcattttacagtttacactcattgccttgattgtattaagtgttattaccatatgtgagaccacctataataaaataacaatggtatgaagcaataccagtcctcattttatgtcctcagaaacatattaatagcatttggtagacatgtttgaataggatcgagcacaacatgagttttattctatgtttggtgtatcttaaaatagaacaaaatgggatattaagttaaaaaagcatgacattttatagagtggaaccaaaaaaaggcagaacaagatagaaccatgccattccattttgtccacaaaccaaagctattcttctcttaaagtcatagtccatatgatccacatcatgagagactacaaaaagcttgaaccgggtcttttttcaaaatatggagtactttctctatatcatggtcatccatagctctaccaatcaaagcatgccgatttctctggataagaaatatggctacctgcatggttaattcataatggaattaaaataaaatagataccacttcaaattcctggggaatttttgctgtcttctgaaccttctttgccatttcaagtaagttgcctgaatgctaatatttattatgtattatctaatgccaaccatggagcacacacacaagaaagattgaagctaattcaagaaagtaccattgctggcccaacactttgtccattatttccatgaacttttcttcttagtaaaaaattgtcctaaaaagaataacaactatatttctaaacatttgcatgctaggtgtttcacccactaaaagatgaaccttcaacatttttatattacacctaaaacaaatatcttaacaagtaattaaattaaattaaattttttgggaaaagtaagctagaatccacgttaatactcctataaaaataaacatgagaaagacatacaaccctatgcacattctaactagtgaaatcctcaaaatatattcacaatgcaaaattaataacatttccagtagcaagtatgtttatttcaactcttatatacttgtgtcttgaggttcaatcaagttcataatatttattttcataattcaagatgctttaaccaaatagctttagttggaaccttttttttttttaattcacctgcaatcatagattcatggtagaaccaaatttaaaaggaaatgcattaggaaaagagttgacattcttcttgcgtgatcgggaaccactcatgaatgcatcaagatatgtttgttttaataaatttagcctacacatttaacaaaactcaccttaaatttacaacaagaacaaaggcaaatgaaatgttgagtgatgagtcaacaaaggtaatctaacaacacatttttaaaatataataagttttcattaaatgaccttttaaaatacattttcactattttttccccaatatgagaaactctcatttcatattcctcttggaaagttattaacatgcactataaagtatgccattaagcatgtgagcataaagagaagatttctttccaataaaaaaagagaagatttcttctttacaaaagtaatgtaactaagcacgtgcataaaaaaaaaacaatttacataactttccttcattccataggttatacactttgagaattcaatcatattcttaatttaaaattgaagagttatctatacatgttcataacatgtattgtttgaagacatactcataacggataacaagggtacaaatttgcattccaaagaatttctcgggaaaatgtatatacagtgaaagaccaaaatatataagtgaaagatcgaacacacatcctaactttatgaaattaagattgtacaatgaatgacaatgaacagaccaagacaaataataaacaaagttctaaaagaacctaagaacacgtaaaaaatgggtgcaagagttttacggacactcattccaagtaataaaaagaatgtgcagcatgtgctgattaatgtgctcagtaatgaaagtaatacacgttcttcaacaacaacaacaaaatttgatatacccaacgaagaaatatagaattaggaatagagaaatacaattctctcgtcttcatggattaaatcaatcaattcacatgagtattcctactttcatgcttagaaaaaaaaaaggttgaaacaaatctaaagaagaaggaaataaaaaattagatggaaacttgcttaaggaagagcacgagagtgaggaatgttgcaagaggctttccaacatcgattgaaattgttaagcatcacccttctcttctccaaagctaaagtcaaaacctatgaagaagcttggaaaacaaagcatggaagaatcggtattagatcattagcaccagaaacaagaattactttgatcctttgcctctccttctgcctctgtgtccccacctccactatctccactaacatcgaaatcccccttcctccaccaccgccctcccctccccttcgccatcgccaccaccacgctcaccaagtacaccatattcaacctcaactccaccaacaccctcataaccccctccttcaccttattctcctttgccaccgaacacaacacgtactatgaagtcaccacctcctttttcccaagcaatgcccctcttttttgaagcgaacacaatccgtacaatgcggtcgcaacatccttcttcctgtgcaatccccctccctctacaagctttaccatatgtggaatcgctctcgcccacccaattgccaccttctttttctccctattttgtgataatcgaaccaacacaccctccgcattctccttcgccgtcgctgtccctctctccaacgctgcaaccaacgccatcaacactccataggaacgaacggtagtcgccagtgaaggatgtggaaggatgaaaggagttgtcgaagaggatggggaaggagacgacgtcagggagagcgatgaccctagggtttgaggacatgaaaggacgcaaagaaggggttttgttgttagggagtggacgcacaacataacatcagttttaaaaaaatcaatattacatgagtattgacaacatcgattttttaaaaaattgatgttaagattacgatatcaacatcaattttttaaaaattgatgttaacaatggaattttgtttacaaaaatgtcactacatattttgtaatattggttttgttaaaattgatgttaactggacaatgttaaatcctatttttgtagtagtgtggggggtttgcattcatggaggcagagagtttcaggggggtggtatgggttcgtggtggagtcaaggtggttggtgggtgaggggttgggttcgtgaaggcggcatgttttgtggtgaggcgaggtaattgtggagacatgggctggagagaagtagggtttgtgacgaagagagtatagggataggcgacaacgagagatctcaaataagtataaagaagaaagacattcaacttcgatttaatattaattgatgttataaagaaattacaacatcaatttaaatttaactagatgttaaaatattatatcaatatcagttaagaaaatcaatgtttttgaagaaatctccacatcggtttatgaacaattgatgttgtaacattctatttaattgcaaaagtgtcattgcaccatttattgcaacagttatcgaataattgatgtagtaacaacaatgtaaaatatacttcgtgtagtagtgtaagaagggctcccctacatgatgaaacacatgctttacctaaagcataattgtgcttgtgtttgggctctctattgcatgcgtttgttgcttaggccaacatagcatgaaggttgcacgatatgatgatcatacttgttgttgatgctccctaattttatgtattttctatatatataaaatgaaaaattaaatagggaagcatacatactggatatactagagattgcaagaaagcattaggaaccttttggaggcttcaggaataaaggtgtgtaaagaatcatattggaattgtcccctttaaaatgagttattttccctttatccttatttacatttttatggatttagttttcctttctcttattgatagataaatttcatatataactagggttatggtgtagcttgttattattttagaaaccactaatttctagttttatttgaattcctatttttgttcaatcaattagactgtcctattatgccaattcttattgacttgatcactctttacaaacttgaattaattgatttgtcaatgatcatatcccaatttgttaataaacctataagatagtcaggtttagaattgatgcatgatcaaattttaattctaaacctcgattgtgttaattgattattttaatcatcctcttcatgttttacactttctttgattttgatttccttacatgccaaaataggaaattaacttaggaaaaagattattggaaatgcatgacccatgatgataataggactatagaggaagaatttgtttttgaaaattaatttagcgttcatataaaattaagattaggggaattaagaataagacaagtgaaattgtaatcctaggctttcttattattgaattccttctcgtgagttttacatccttatttaattagttttttgggtacaatatctaaactcaagtcctttttactattgcaataaagtataattgctcttaagtgtgttttaaacgcaacaaattttgacataaatggagagagaacaaggtttcaaaattgaattacaaacaattaaattcaattataaagcaaattttctagaaatttattttctaaatcaattataaagcaaacaatataaaatattttgtcagaataattgaattataataacttaagttgagtttatttttttataagtagctttgccatttttgtcatttagcatatgataattaagcagctagaacaccatagatgctacccaatctattagatcagaaggtaatctcgctcacagtctatgattattactagtccaagagaatttcacacatgatggaaattgaacatgaattcttccactaagtaaatcgtttacatttatgtgaatgtaacaaaattttacactattacaccaatcctttggattaagcagctagaacactttaggaagtaccataatggcatgagtttagatagtcacctttgctaagcatataagatatataacgttatttggttttatttagaagtagtagaatagaaagaaataaactactaatatataagggatgtgatttcattcagtttgatatggatttgaaaataaaaataattaaatacaactatctaaatcaaatatatatatatatatatatgtataaatgttttttaattaatatacaatattattgctttgaatcaggtttgaacagccaacttgtatcttagtatttattaatatgaattctatatactaatatggacgcttcgctagcttcccaacattaatttggtccaaattatgtatctagatttttaataccccatcatgaactagtagaagttaaaacattcattgtccgtcatataaacatcactaacaatcagtctctttccgagggaagatttaccattattattttacatgttcgaaggatatatggagatcatgaagaatatagaatttcagttgctagcctatcatgaacaagtaggattaaggggaataataataattttctcattccatatattgaccttttaggctttagctaatgcaaatttgacctaggaactgaagaatttaatgacaagtcttttatcagaagaataaaatatattttttttaaaaaaagatggtcacatggaaacttataaaaataaacaattatttttaaaaataaactaatccaaaaacatatattgtcaatcaatatttaaaataattcattttgttatttaattacgaagtaaccatgagaccatcaatttgcaaacaaaccctatcttgtgcagtgaatcttattgacttagttcgtgtgttgctttttcgagtgttttttcttctcttggtttttttttttttttttttctttccatgttatagataagacttttcggtttacaagcacatccacttcatgacgttttaacaaaacacgtagcactcttgtggttccaataaataaataaaaacattaatcaagctacatagttcaaaaatctaattattcccagagagaaataatttgcttctgcgcgtcattagtgatgtaataaatcattttgtcatgtgattttgataagactcaattaattattaaaattaagcaaattaattatttttttacagacaaattaattaattaatttaataagtagtattaaatttgtctagaatttatatatttttctaaaattatccttagtactaataaggcatactcttattatctttttaaaatatttatattaattttaattcttttaatctctcacatgattaatatatttttttattaatttttattgattattatatatgtaaatacccaaagtaggttttccagaatactctttatacaagacacattaaactcacaaagagcctaagatataatgtatttcactaacaatattgaactaaaaaacacgattcctaatattaaagatattttagtgaaaaataacaattattaaatgagacattctagattaattcttatagaaagaagtaagtcaaatttttaatttgggtcttataaaaagaaatagagagaataataaagataaatggacagtcccacgtatgtttaaatgattttttttttgtaaagatagtctttttagacaaattatttatagttatgcattttttagtgtaattcaagaatctataatatatgtttacatagaaaataaaccaaatattttaaaatactacagataataaatatcaatcataaatttcatgtgacaaatttttttttatgaattataataaatattagtatttatgataactacaatttttaagaaaaagtcctacagtgtccttgaacttttatccaattttaattaggttgttgatttttttaattgaatctcaacttgtattaatctttttaattaatttcatgttggacctaattaaaaaaataaatgcaagttcaaggacctaatttaaaaaagttcaggaatctatttaaaaataaaaatagtttagagacctaattaaaaaactatgaaattctagaagccaatacttttatcctttaaaattctaaactggttgaagagcctaagaagacttaatttataaactgtagaagtaagaatattgacatgcagacgtgagaatattgatttgtagaggttgataattttttaattaggtcctggactattgtcattttaaaaaagattcttgaatttttttttcttcaattgggtctctgaagttgtatttattttttaattgggtatcagttaagtagctaaatgaacctaattaaaaagaaaataaattttagggatctaattaaaagaagaaaaaatataaatttcataaacgttcagggacttgcagagaaattaaatccttttaaatttgcttttgaattgttggaaagcaaacttctggtgttaagaaatatatcatttattcctcaaattattatgacaaaatcaatagaaagagaaggctaaaaagagtcattgaattgaaaatgcaatattataacttttgaaaaaaatgaaagattataaacatttagtaagagaaataaattagacttgaatattttatttaaaaaaagccaaaattacaatgatctctacaaataggattaaaatattttgtaaaaattaaaaaaaattaaaaaatattattacttacataatctaaattattttgtcttttatttttaatatttttatattcctttttttaaaaaaaatattttgtggggtaataccaaacttttttatgtggaataaaataataattattttatattcatgtgtacctacatatgtgcatccgttcatatatatatatatattaaaaggttagggttcaaggcccctcttactataacaactaacaagtaggtatgtctttgaaatttattggatcattttttaatatattctttactgttgacttaagtttattaaaaattataaaatattgtgtctcacttcttggttagtaagttctatttataattttgtaatttttaataaatttctaccaacagtaaatagtatattaagtacaagtgtcttactagcacttcttttatataaatatgcatgaacgaagtatacaattgatgtacttgacgtgaattgttgactgagacaaactatgatgaaggtaaactaaggtaagcttttgagtagcacgaagtctagggtcttatgatgtatgatctttgaagcaagacagacacactatgagatcgaaatggatgggtaccagcataatctatatatattcatgttgattatacttataagtgtctgagatgagttatatttccatgtacaaactcaaagcctagttataagagtatgagattgaaaacaattgtactcttagtgtagcgataaggtgacattgctccaagactgatgtactatctaatattcataatcacatatatattatgagtcatgtacgtacctgaacgttaacttcaattaacacttgcaatttgagttaattaatctatcatttaggcctaaatgtcccatttgacagattagacttcatgcccagtctcaaacaaacaattcaattttttctttttagaaaaattgttaaatccaatttataagaattaaaatctgcagtttttgtaattttagtagtatgcaagggtttttctgtcttttatatgtacatccattacaaaattctcgtatctgaccatatgaatcatcataagcttcaaattcaagctcagattaaagtccaaaatacacacagagctatcaaacacggggaagaaggcaagaaggtcgatctcatcatgaaatttagtgcaggcatctttgggttagtagccatttatggctatgataggaatggctcctatgagtgtctgaggggaccaaactagatcaactgtgacaaataaatgaggggtacgtatttggggccctgaatgggagaggtcagtttctatactctatattgaggggtccatttatactagcactggttcttctcttatctcaatacgctttatctgtatggtcatctatcatcaattattaaaagcgtaatattcctaagttccaaaacaaagcaccgggtataataaacctacacgggctcaccgtaaaggaagtttaatgcatagtagtctctttacgtgaactatacttaaaagagaatttatatgtacactgcgcgaccttcatatatatatttctccttctttatatcctttaaggggatatgtattggataagcttcaaatcaattttaaacatttgtgtaagcatgacgcatttgtaaagaatattaattagcgttatattaacttggaataagaggacgatatggaggatccattttatatttatttacaagaatgagatcttaatcgtgattgaacattttttacagtaagaaacttatgctatttcttgattgggaatcaaatcatagactagcaggaattgggtttctctagcaagatgatgggtcatctcctaataaaactgaccacgtagtgttgaatacaagatatttcattccttcaatgattgagtaggatgttgacccctgattggacaacattttttttagataacaatcattgaaacatatttaatgtatgagctttctaatatcaataagttgttcatcaaagtaacaatgagctaggtctttttaagtataatttcgagtttaaattttgttaatggaaaaaaatataattgaaaaaatgatcacattaaagatgaccaaataaatttttattaatatcaacaaaactaatagatattttatacaaatatcttggtgacccaaaaatatgttttataatgcttcgtattattatgaaattaaggtaaaggtacaacaaataaaaaaaaatattgatgaaatgagagttgccactaaaatttaactttattagaaaaaagtatttgaaaaagttgtaaaaaatatgttgaactaaaaaaataaatttgagagtcaattatgtgtaagaaaatatatatttattatctcacctcttgtaaaatcggagttgggttcttgagttcaagaacctctgtccaccatatttactactactattcttatctaagatttttttatactggatttggattataagggaaaaactgccaagaacttcttttttttttcttcaaaaaatgttatttcttaatgtctatttccctaattgagatctactactagagcaaaaatatccaagaactccaaattgagatctactactagagcaaaaaatgacttaagtttttacatcctatatatgtgaaattatagaactcacaaaatataatccaagaactcaaaatggattcttccactaattaaagatgctctaagtatcttcttgcgcaataaatatcacatagttactgacattctttcgaagagatataatttggttgttattatttacacaaaaattgtgaaaatatttgtgacgtcatatacaaccatatccttaaaacataaaactaacataatgttgtgctcaagttgattgctttttaatcatatcctcaaaacatacaatgcatatagttgcattttgtaacaatcttctatctcgagacatacactttccaaaaatttcttttgtagtaaaagaacattgtatctcatatattcaaaaatttaaacaaaatagttcaataaataatataattcaaagttaaatagcttttttcactccaaaaggccatataaaaccatgttacataaaacataaagaaaaactcctcgtaaattgaaaacatagatataaatgactaaaactgatgcttcgatgttacattgtctcatagcactcttaaccataaaattaaaaataataatgtggaggcctaagtaccattatcatgaccttgtagaaacttattttcaaggatgacattcaacctaaacgcaaacaagacaaatatatatatttaaaaattacgaaagtcataaagagacaatatatatttataaacaattacattatgcaaacataccatattatgtcccccactcacatagacacagtgctatgcacattagactcatagaccctatgcatgtggtatcatttttaaaacaatatgaataaaacccaaaagtccatgcagtcgacgaattgtcacaccataggaaacccaagattatcactctcgtctagattatgtcgttggcagtgcgttatggtgttcgtacatcacaaggaatttcaacccatggatcaaacgtgaacttgaaggagattccaaaaggttgcaccccaaggtcagagtcatactgaaacaacaaatatcacactagaagggaggttgaatagtgtgttaggaaaacttaaagattttcgaaagataaaatagttttcaaaagatacctatcacaagtttgaagaaagttctcttaacaagagtgtccaattcttaaaaatagattttcacaaagagagtttagataaaaacttgtgcattcaaagataagactgaggcaactaaaaataaacaagttataataaaagttggagtaaagacacaatgtttatactggttcactcaactttgtggaaaataagaaccactcacaattaaccaagaggggggtgaattggttaaccttggtaaatttaaaattttctttcaaccaaaatcaaaatttaaaatcagagtttaattccctttggatctttatcacagaatcaattaaactttatccaaaaacaatgcaagatttgtaatacttcaagaatcaacttcacaaagaagaaaacacaatacacaagatatcattcacacaagatatgatgtaaattgcagaataaaaatcaagagacaagatttatactggttcacctcaaaacctatgaggttacatccagtttcttctactcaacactagagtagattttcactattgcaattatgtttcttacaagcaattacaatcttctcttcctcaaccctagagaaagttcagagatctaaaaccctattagacccttagaagataaacccacactaagaaacctactcaattgtttttggagaaaacctatctcccttggagaaacactatcccctcttgcaagaaacctcaatacaacagaatcaacaaaatacaaagatactgcagaaaacttaaaacccacaaagaattaggaaagaattcatctgatgatccaagattgaaatgcaaataaatgacaaaactcaggttgaatgcaattcaaaatatgcagaacaactttcctaggcctttgtgaaaaagtggtttgcttcactaacaaaactaataacccatggatggcttagtggaagcaaagctcaaataacccataagaatgccttattgatctcttcgtaagctcagaacatcgaaaagtttaatatcaatctcaatctctgttattatatttcacaaaaaggcaagggttatatttatagttattttcgtaactaaaataatcgattaaataagctccagacgctcttgtaatcgattaaaagtgacctttggattttcataatcttatcaaacgggtcaaataatcgattaactcgtggtgtaatcgattacatcagtttaagcaaaattcccgtttaagtaaaataattgattgcattacatggtaatcgattaacccagaccaagcctaaatctggatagttagatgaatcgattacaatccaccgtaattgattaagccagcgtgagtgcaaaacatgatttaaactatataatcgattacaatgagtggtaatcgattaagccagagtgtctgtcttttcaaaacaaccatgtaatcgattacaatatcatggtaatcgattaaaccagtcataaggctaaatcctaagtatgttgattttcatgtaatcgattaagacgatggaataatcgattaatgtgttcatgtttgattttccagaaaacttatgaacaaaataattgattcattcattccaataatcgattaaaacagtgctaggttatttttccaaagtatttagcttttcctttagtttcaaaataattacttaaaaacttatatgatgcaatgcttgtatgatgtatgaatgatatgtaactaaaacttggatcatcacaatgccttcaaaccttttacatttaaatcaaaaacatcacttcttcaaatcttgatccatgttgaaagccaaaaccttcacgtcttgaaccttgcatgaattttcacttgatcttcattcagctccccctcaaatcaacaatctccccctttttggctttaaacatgccaaatcttacattgaaaagcaatctccccctttcacattgcttatcacctgaaaattcaaaaaattctttccaagaacaagtgttaaagatatctgagcttcattcattattcattcttgtcatgtatgcatcaatagcaagtaatttcaagttttaactcccccttaatttctcaatttatgcgcttaaatttttagttaaaaatgactcgaaaaacaaaggtgaacaaagtatgatgcagagcatactcgagcattcttgttcgtacttgattttcaattattctccccctatttggctttttaaaggcaaaaattaaagacacaacggataagtgaaccaaaaagcataagtttcattaatataggcgaaggagtacatttagatgcagaaataagaactttgaaaaacagagtacatagaaacataaagaaaatatacttagatagtataatggataagagagaaagaaaggggatttacacgttcctcaaataatttttttatcaacagcttgtcttttctactacgtgacagtttgttgaggagaaagaaaggggacaaaggtgcaatgcttttgtggctctctctctactacttgtacaaattaatctatccctgacgaaattatgtttgtctttgccttttatatacttgaaagtcaaattttagaatgatttaacaacataaagaaaaaattcaaatgtaagaatgttctaagagagaatcatactcgagatgctttaatgtgcaagcataactatttggacattcaccaactgaatataaatcattgtgtaagttagttatgttcttttggatgcataaagaccaggggcggggaaaactttctcggggtcctgtttaatatttcccttttttagaaaacagagtcctcaattgggaaatttgaaggttttttttaagagagtaaaaagtgaattaagaaaggaggagagaaaaagaattgggaatgattgatgaaaataggcaacttctatgctgtgattccccaaatgaagtattgaagtatcaagtgcgtgtctcaggaaatgtaaaaatagtaaaaattattgttggtgggaattgaaccttggaccccttggttattaaaaataagcattaccatctcctctaattttcaatattatatgttgcagtaattaatatttgaggccccttattttttgggaccctgtgcggttggacaccttgaatgggctcagaatcgcccctgataaagacacacagtacatgagtactggtttttataaaccattcgacacttgtttaatgacaatgtgttaaacgacgaataacacaattaacaaaaacaagttccatttgcctttggaaaatatcttgtaaaagcataaggatatggatatttaccatatgagcttatatcaagtatgtcctgtttcacttcacataaaccattagtccgtcaaaaatttatatttttgttatcatcaaaactaagggtactttcaatttgtctagatataacatattggaccttccagatctaacaatctcaaccttttttatgatgataaaccatataaattttgatcaagataaaccataatcaagaatgataaatatgagggttttgaatgattatggattataatatcagagaatatatatgtacaaaagtgttagaactccccctgagtccaacaacatttatgcatgttgaataagatagacatgtaagatcaattagagcaaacatgcatataatcagatagacatataaaaaaagcaaagataagagtgaaatcaagaagagtgatccaaactcatttataaaagcaacatatgttacatcatgtgtcttttacaacaattgagcctataaagaatgaaggataagtctaatgctcatgatacatcaaaattccaattttccccttttctcatcaacaaatagtaggtttgaaagatgggaaatgataaattatcattttaatttatggttattgtggtgggcccttttgggaaggtgattttggggatggacgttgtggtgaattttattgaacttgttcaaaggttattattgtagaagcagatgtagcttgaaccaattaatggtggacgacaacaagttgacaaaattgacttgctatatgtgttgtggacagttgaatttgttgttccaagagattggacagattcctaaactgttcatccattgtggcatgcatagctttctttattgttcagcctcagctcgcggttgctcggtgaacactttgatgatagcttcatatttttatttttttcttctcaagagcttgtttaatgtgacaaattgagatggtgcaacaaagttgataggagaaattttgtttggactcatagagtgtttgatcactatgacttgagtttcaacattctcgtcagcatccactccagctttagaaaggtaattgtttgttttgcaacattgtttatggcttgttgactttctttggcctttttttatcaccggacccgccaatgggtatcacttcttcaacctcatcttgaattggtgaaaatgtgttcattgtgggtgacagtatcaagtgttgaggcaagaacatctttttgtggacttgcagttttgtcttttatcaaaaggtcatcgacatatgtatcttcatccagcttcaactcatccacaacttcaaagatgatcattttttgtgtttggaccttgctcagacagtaatgcaaatttcctcatatgaatttccagttctttagttaaccaatcccaaatttgcgattcaacttgaaatatgtgtgcttcatatgtagcaacatagagacgaaacatcacagatctaagtacttgaagaatttcaacttctccacttaactaaggttggggatcgtccactaagaagcatgcaatgacaccaccaaagttgtagacttttcaaggaagaatctctcctcctcctaaggcagaagtgtcttctctttcttcttgggagatttaagcttctagcttcttgtctttgatcatatggacgttgttcccacatgcgtccaacatcatcttcaaagaactttcttctttcttcaaatagttgtttcaacttctcaacaataaggaatgagaatctttgccaatttattgcttgctagataggtagagttggagcacaacgctttggcttctttttcctgttagggtctagtgtagacatcctttgacacaccctgtcaggatagaattttattacaatagactccttgatgtgagagttaggaggataacaaccactgtagttattgaattgtagttgagccttaatcacatttgcaaagatgatgtcattggggtgtggagcgaagcctcttgtgaaaagtctaggttgctcaaatctcagtctgtttggacggatgtttaatggagtttgagtctaattgtttgaaacaacagttgagtcctttagactatttttgatggcctcttccaaggtagcttactcctcaatgtgtaaggcatctttttattcttcttcccttttcctttcttattgcccttgctttgggttgcacccttctcttcttcttctgcaagctctttggcaataagcgtgtccatggccatttgtttttctgcttcctcaggggtgggagtcttcttatgaagagcaactcttgttgtgaggaatgcatcctttgtaaggaaggataaaaggaccctttccttcaacattctccaacaatataggcttttttcaagttgtgtccttccaagagaaggtgcctttaagaagagaacgaaactctttcgaaggttgatcaggttcatcaaaagagtagtcccatgttggattgaatatttctactaaattaatgaaatgaaataatcaaaataattttataggagctaaaatcacaaaatgaccaaattataaggattaaaaagatattaaaccctaaaatgaatggtttggggtaaaaataagaaataagtataaacttccaagttattatttaaatttttacaccactatcctaatcttaaggagttttagagacctaaatttaccatttaggtaaacaagttataccaaataaatatttggtcatgacgagaagatcacggacgcgacataccctatgaagatgagtaccctctcggccatatacccacaaattttgtgcaatgtctcgaccttcaacatatacaagtgataaatgttagctatgagaaagatgaagatatggaatcaagaaaaatgaagaatgcaagttttgatgttttacatgcccactcaattcatggcatttgtaatttcttgcttaagcttggttcaactggttaaagcctcataatcctaactaatcttgattaattcatgcattcatacatacatttaatcatgtttaatcatatggtaataagtaattagatgtaaagtcataaaggcaattacatttttataaaaattgtatttcactgttttaatcgattacatatatgatataattgattaaatgcatgtgattggatctgcatattgccttatgaacattttaatcgattaccattgactcctaatcgattaaatgtgcctaacactgaaatagacgtgctctgtgataatcgattacttcacggaataatcgattatctgagttactgcatatattacaaatgcattttcatctggtttaatcgattaccagatattcataatcaattaaatatgcattgatattttttcacgttgcctgcgataattgattatttgggaaattaatcgattacacatgtgtattagaaaactcaggtcatctggaataatcgattacatgatgacttaatcgattattttgttcttgacaaatttctagatttctgatgaacactttaatcgattatctggttaaaataatcgattatattagttaagataatcgattacattgacgaaataatcgattacagttagttaagtctgttttttttataaatagaacagcttgcactgagtttgcatatgaaatattttgtgatatattcgtacaagccttgagaaaatcactttcaagagttcttaaaaacacaaaggcaagaaggagaagagaaaataaaagatgctaagagtcatgatgtgttgcatgttatgaagtccttattcacatgttgtgaagagttattcaagctttctgattaaagaaatcatcaagaaagattaattgcatacattctcagtttggttagatcattcatttcattgaatttattgaggaataagaggtgatatctttcttgaactataagcttggttatttttttattgatatttgtgttgtatttgtattgaatgttcttataacaaattgtaatctttaaggctttttctagaagggtttctagagggaagaacagagaggggatctctggttcttgatcttttgaaaagtctataggtttagattttgaattttacctagggagggtaaaagagatccctgtaagcttgtaaagatattatatttgttatagtggaactctgaccaaggtttggttagaagaaaactggatgtagcctccggggttgagaggtgaaccaatataaatcttgtgtgtttgaatatttctgtttatgttcataatattcttgaactattaagttttgttcatatcacaagattggtcacaacacaagagtggtttgattgataaaggtaaaggttttggttaaggtgaaggtgaagaaaattgttttcttaattgtttgtaaagatacgatccttcttgaaagtcttccgatgtaacatttttgaaagaaaattttaaaaactctgaggaaaaacaaattcacccccctcttggttatttgcataagtgttcattatattttcaataaataccatttggccacgattatcgtcaataaacccacgtaaggataattacttggttagaggtactgaagcaagattaagaggcgtattacctaactagtaattagaacatgcagacctaaagacccaaggcccagtaaggtcattatataaatagaggagcccccctagtaagaggactaattcattctcgaatattcactaaacatccttgatagctctgagccaaaaccttacttgggcgtctgaatgccttttgtaggtaccccttccccccccccccccccactctttcggactgaagattcactaacagttccttcttgagtaccctcatctaccaaggttaaactcgaagattcactaacagttctctcccaagtaccctccttgaccaagttgaactaaaaaattcactaacaattccttcctgagtaccttcatcgaccaaggttaaactcgatgattcactaatagttccttgcgaagtaccccccttggctaaggttaaactcaaagattcactaacaattccctctcgagtacctccctcagtcaacgttgaactcaacgattcactaacatttccctcccgggtaccctcctcggctaaggttgaactcgaagattcactaacagttccggcccaagtaccctgctcagctatggttaaacttggcgattcactaatagttccctcctgagtaccctcctcggctaaggttgaactcaaaggttcactaacagttcccttatgagtaccctcctcggctaaggttcactaacaattccctcttgagtaccctcctcgaccaagcttgaactcgaggatttattaagattgctttcctgattcgttaaacaaattatacagcttatgttaatatttcttactccttggttaaaaagtaaacttacaattatgcaatttacttttaccattccactgttgaatacactttttcgttgaatacaaagattaataagctattattaataacattaaaaatcataacaagaaaaccaattcttcaaaaggaaattttcattaatattaagccgaagaccgccaatagtgattacaaaaaaaatgcacaaaaaagttatacatgtaaatctaaagaacttaatccctaagcctagtatggtcttcaccctcggccctggcaccttcaacgtgtacgtcctccaccggggtattcttcctttctggtgtaagagttgtgtcttccaggatttcatcaatcaacatcagctccttgtcatacacatctttgttagtgtctaagacacccgtatcggagacttcgcatagatacagcacctgccggaggcaatggttgaagtcgaattcatgcacattatacacattatcgaaagccttctccttctccttatcaacaacaacctcctccttctccttgccagcagcagccaatgccaaccgaagcctggcaattttagcatcctgatatctaaccaaggcctctgaattaatagcgcacgtctccaaccccttggcctcgattgtcaacgcaagcacccggtcctccaggttcttgggttccctagccagcttcatgttagcttgaagtgttgagtttagagagtattcgaccttcaacaactggtccttcaaggcctcagcattcgaggacccctggagatgttgggtcacaaccaaaaccctagcaatgaagtcctaaaaattggccaagttggcgatgtcatcgtttttgctcagcacttgtcgcccatgcttaaaaatcatctctggatggacaagatgatccaaccaaaagtcactcatgaagaaaccttggttggcaaagtcgacaggttacccaaggtgtcgacaacaattggcttaaatccaaggatttgctacctgagtcttttatcataggtggtaccctcccactgtctctccatttcttatgcttttttctccttgggatctttgtccggagaaggcaccacattagtcgatgtgtcacgtggcctcagtgctcggttgagaggagtgttagaagaaggacttccaccgacagcaatctgattcctgcgagacaagtggaaggcgttcatgtcaacgtcatcttgagtcatgattgctgaaaaaaacacaagtgataaaatgcataagttggagcaagaaattggcgcacaaccaaaaaaaatataactaaccctcaagatactagacaggatctggagactgcagaagtgatactagaggccgagcaggcagttgccaagggagcatttcaaggaacttgaggtctcggcgtttgtcggggctcaagagctcttttgggtacttgtcgtgctgacgatggcattgttgccaatagaagggaaacaaaggatttctcgtgagtcgtaggaaaagttattctcgacgagtgaccttattgttactttaaaataaccagtcttaaaattcttgtaaaaagaggtgaaggggagaaaaaaaaaaggacccttcgatatccggatcaatgatatccatcgagccttttcttaaggatgactggaaaaatattgtaagaagagtccaagcattgccggcacaaaattatacaagtagagtgtgcggaacgcttgtagggggacccatccatttggatgaagttgtgtgggggacacatttatgatacgaagcacgcccatggtgaagtcatcaaatgggatccttacatgcgaatcgtgaaacaagcaatcatacatgtaaaagaaatcctattcaccccttctcggttcatgaacacgaactctgcaagcagagtgacatctaaccggacaatgcagagagtgataggacaaagctccaactctgttatggtactaatcaacaacaaactcaaaagattgagcaggtctgacttgtggttatatttgaagaagtaggtacttacctttccatcaacccacatatactcaggaagtgtgataggggaaggcgagcccttctccttcagcacagggcgcttcttaggccaaagtgtagctctaatggaagtcctcgcctttggcaacaacaatcgccaccggagccgcaacattctcacccactttttccagtaacccactcaaaagtgcgaaaaattcattggacgcctcagtgatcgaatggtcaaatgaacttgcaaaattcgaccccgaggagtgagaattagacgacaccttaaaaactttgtcatcgtacccacaaaccttggacctattacaaaccaactcccccgatgacgaaccttcgatcgaaaccattattacgtacctgaaaaaagaactagcttataatactactcgattgagagtaagaagtgaatataagaggtaaaaagtgaataggggtgccctttatttataggagttggacctacgaagaagcccagtcaacaacctcttcccaccgtttaattagaatagatttacgaacgagataacgcgatgttttgatgcccaacatgggaagataaagagatgtacggcgtaattgttacatccacaaggtaactcatgccatttgaggagcgtaaccatccgaagaaaatcgtaaccgctctggcacgatgagtagagcccttctttttggccgaggccaaaaaaggacttgggggctagtataccaaataagtattcggtcaggacgagaagacccctgatgcaatataccctatgaagctggtaccctctaggccatatacccacatatattgtgcaatgccttggccttcaacatatacaagtgacaaatatcattcggccatgattatcatcaataaactcgcttaaagataattacttggctagaggtacttaagcaggattaagaggcgtcttacctaattggtaatcagaacatacaggcacaaagactcaaggcccaataaggtcagtatataaagagaggagccctccaagtaagagggttgcttcattcttgaatattcactagacatcattgatagctctgaatcgaagccttacttgagagcgtcggagtgccatttgtaggtacccccctccctggctctttcgaacttgtatgcatcagaaacattgatttgttaccatcagagagatccctcaacacaataggagacccttcagtataagaataagtgtctgatccattagtaataggaatgagaagacccctgctacaacataccctatgaagctgagtacctctaatagaaacacaagtaaactccaatgacgtgtccaattgaatttattttgtgcaaattaaatgatataagtattgactgttttaatcaattcaagtaccactatgccttatttgtataccttatttgaatagaggaaaggagatttgtttaacattttgtgcttttctaggctcgaaggtcattcaggggtgtcaacaacttaattaatagaagttacatggcctttgccttacatgaaagtgaaagcaagaaaatagaagtatacagtgctcccccaagtccaccaatcctattatatcacataaaaaggcattttccgtctttggattgatgtactggcccgaatcaagtagtataacccttttaagctatcagtgtgctcacgattcccatattgtttttattcgtcttttcttcagtcagaaagcttggtcattcaaagtccatagtgctccactaggtctttcatgattacattttctgctatatgaccatataccaaaatacatatatttaattcgtcttaaaataaggcttttagtgtacttgtatcatttttatattgtgattgtatacttttaatcaataaataattagcaaatttgccgataacttaatgaaagttcatgtatatataattgtttttatatatgatatgcttcttacatgattacaccgttgatcatctattatgttccaaaatgttttagtaatagtaatttattagtttagtattaatttgattgttgataaatatcaaacaaattaagatactgtcataaaattcttcattaattatttagtttttttttattattcataatggtttagtatcgttaagtcctattgataagtacaagtctagttcttgcatactaccaaactatattatcttcatttgattccataagaaaaattgaaagagaagacatatcatttcctcccacaccaatgagataggattataagcgtgtcataaaaatggaggtggaaaagggtcccatttgaaaggcaccaatggaacattctccgagttttgatcctcgtgggaaaggactttagtggcgtcaaaatccattcactaatcattgcttcccccactaagccccaaagctttaaatgggattattagtgagaacaagtagtaataatatattgtaggtttgaccaagctatgcggccacatctcattggctgaaaccacatcaatacgtcaactttgcaagtcataatattggaaaaataacaatgagtatcctcccatgcctaaactatcaaaaatagaaagcaatataatgagtgttaaaataaataaaagtgaaggaaacaagggaagcaaaggaagcacagagtagttgaagcgtggagaactaagcaagtgggaaaccctcacccagccgacaaatccccgtttgaacgggacaacttagtggttgtgttattattattacaattattagttttctgtaccacattatttacatattacatggtgttttttagccctaaaccatggtggctttggggattgtggtttgttccaccgtcatcatcacaacttgtagtatatatatatatatatatatatatatatatatatatatatatatatatatatatatatatatatatacttaaaaagagaatgcacttttttagaagtagttaattttttgcacttttctgtaatttttatattaaataaccttcccccacccaaaccgcgaaaaccacttgcatgcattaacactctacctacctatgtctgaaccccccataagactacattgcatctaattatctaaatttacacaaacttctattaacaacatgtttctgccacttattctctacaatagctctcggatagatcctccatgctccacttggatcattcgcaccaaacttagttttaaaaataacttcaacacttattccctttttttttttaaataataaaaggaattagttatattcaaatatattgaattatattggatttaatgagaaaaagagtttatattcctaaaccctaaccgaacacaatttgtacattaaagtaacaacactaattatgagagcattaaaacaatttaaagagtaaaagttataagagagtgcaccgataattttctactaattcgattaattaagcccaacctacgtcaagaatcagaccacaacttgagtttcactaagtaatataaatcaattacagaaagtgagttgattatgtcatcacctatgacagcctcgcgtggacacccctctctgaatcctaagccttagcccttagtgatcgcgtaccctagtgaatatgacaaagatgtagatagtgattatgccatcggcgataacaacccaacaagaacacccccttcttctcataaataaccctcaaggcctcaagatcttgaacaacttgctaatcactcacaatagtgggaatagaaactattggtgtgaaatagaatcagtcgttgagtcaactaataccaaacgatttccttgtagcgattgattcaaggaaagaattctattccatgattgggttcctagttcctctaatatatatgcgagtagtaccttccatgtattacattatattatatttttcaaatccatacaacttaatgaataaacccaatgtttattctaggtccaaacttaattgatgtttctcagaataaataactgtaaatgtgcataaactgaatgaaaaacatcacaatagaatttcttaatatcattcttacaatgaaaatcacatatgggaaccaagtcccatcatttccacatgatccttaaatttgaatggtgtcatgcccttaattaaaggatcgacagtcattaatccagtgctaatgtgttcaataaccactgtattatctttagcacattctcttatggctagatacttaatgtcgatgtccttgcttcaactacaacttttgttattcttagccataaaaacaacagctgaattatcatagtatatcttcaatagcctagaaatgaaatccataactctaagcccaaaaatgaaacttcttatccatacaccatgtaaggtagcctcaaaacaagaaatgaactcaacctctataatggaagtaacagtcgattaaggtctgcctgatacttctccaagacacagttccactggctagcataaaaatatatcccagagtcgattttctcgaatcaacgtagccagtgtagtctgaatctaagtagtcaatcacttctaaattgtcattccgtctgtgcataagcatataatccttagtttcctaaatgtatcttatcactttctttgcaacttccagtggtcaaaacctgggttactttgatatatccttaacactccaaccacaaaaacaatatcaggtcttgtgtagacctgagcatacataaggctttcaacagctgaagcataacgaatgttcttcatttgttcccgctcgagatcatttttcgggtattggcttaaattaaacctgtcacccttcataatgggagctacacttgttgaacaattactaattctaaatctttccaaaaatttgttaatataggtctcttgagacaaacaatgaacaccttttactctgtttctttgtaacaccccgtgtacatccggtgtattaacattattatttatcagattagcgcttaatcactttaattaaaactttgcggaagcataatcaaaaaccatatttcttgattatattatgtatggaacataaaacatcgcatcataaacaacacaagcccctgctgatccagtaccgcataaacataaccataggcagataacacaactatctcaacagatataataggaggaaacaccaatacataatataaactggttatgtacatatacatcatttgacactcaaagtgtctatacaaaagaataagcatccgagagcttttgatctctaagatccttcctcacatgagggcatgcataacatatacaaatacaaaagaatacatgtgtgcacacacacatcttccctctacaggggtacaaaacattatcaaaacacatctgagccacccagctctccctgctgcctcatggccaagcaatcactatctctattggggcctcccgctctgagaccgctcctctctgccagaagagtcacctgaaataacataagccccacacggggtgagatatacatctcagtaagctcagggtccttggaggcatctcctccaccctggctcactttccatgacacaagtcatcaggcatcacaaacatactggcctcccggccctcataacaatacaagcaagtcatctagctctaatgtaaggtggatcgcatcaacaccaaacctcagtgtgagaccggaacttacactcgtgtcatcccatcgggagctaccccttacgcatggacgcacgtatatggtacctccgagaataggcaatcaaccgcgacgggacacacctatctcttggtttcaagggatcatcatcacccacgagcaaaccaaactaggaggtgcgttcttctcctagagatgtttatatctatctaactggccaaaagatctaacaacaggtatcatacacatacaagcataaatacaagcatacatatcattatgagtaatgcaacaaccatcaatacatgcatcatgaatgcaaccatcactccctcggagtatggtggagcacaagcagtgggaaacatccccaagggaccaagaacttatctggcaaagccgagctctgcagttctttccctgctctgtggtctacaccactgacaccctcggtgtcacgccctatacaaggcacacaagctcatatcaaagccaattcaaccacacaaggcataagcataataacacggttctcaaccgtcacaaagaaagctacctccatcctttccaaaaccactaactcctctaacttaaggtttatcagagtccatcaaatcatttaccacatatatatgtggtctagcttggcctagccaaagcactagagtcttcacaagactcggtaaaagccaacacaaagagctctaagctctatacagaccatagctcaagaatcctcattatggtttgaatggttcttcacatacacaagacaccgttccaacagcctctcaagcacaacaaagccatataccaagggtcttgcatgtcacaacatagccaagcaactcatcatactaatatacatgcatcacatagagccaagaaaatcaaagttcaccaaactaacatttgagagctaatccttcatcctcacaacattctaaacacatgtttctaaaggacccaaggctaatactagctctatcacaagtgggtcactattcacccaaaaccccaactgacaaatcaagcggtgaatctcaagtttcttacctcaatgatgacaaggaaggcccaaggacgactcccccaagctcgggtatccactaatcgtcgtcattcctcgtcgaactcgagttctacggacttcccttgagaaagggattctcaaatttggggtttctaaggggaatttgatgaaggattcaagctcaccaagtgttttccaacaggatttcggttcaaaggaagtgatttggtgaactaaggtgaaggaatgaagcttggaccttcaacaatggaggtggggcgctggaggaagaagaaaggaaagattttccttcagaaatcgcgatttgccctttttatagtggtcctgtaagagctgccgcgcggatcgcaccagcttccagagcccaaggcgccaatcacgccactcccgcgcgattcacgccatcctccagtaccaatggcgccaccagcaccactatggcgccactcgtgccccctacaaagaagaacaggtcctctggatggtctagcaccactggcgtcaacctccagtatgtacagcgccactcgtgccactgtggcactcagtccgccagtgtgcatggtgctgatcacgccacactggcgctaccagtgccacacctctgcactggttttctgcataaaaaaccctggcgctatccgcgtaaagcccacgccatccgtgccaggactcagggtcattatactcttgatgccaataacgtaagaggcatcacccatatcctttatatcaaagttcttagagagaaattgtttcatcttatatggcaaacccttatcattagttgcaagtaaaatatcatccacatataaaataaggaaacaaatttcgctgccactgaccttatggtatatacaatgattcatgacattttctacaaaaccaaatgaagaaataacatcatgaaattttaagtaccactgacgggaggcttgtttcatatatagatttcttaagcttgcataccaatttctcatcttcaatggaggagaatccttcatgttgtttcatataaacctcttcctctatgtctccattgagaaaagtcattttgacatccatttgttgcaactctaagtcaaaatgtgcaactagtgccagaatgatgcgaagagaatcttacttagatacataagagaatgtctccttgtagtcgattccttccttttgatcaaatcccttggctacgagtcttgcttcatatctctcaatgttgcctaaatgagtctttcttagaatgactcatttacatccaatggctttcgcaccatcaagcaactgaacaggatcccagacttcattcgatgccatagaattcatctcatcttttaaaggatcataccacaagtttgattctttagaactcatggcttgtgaaaatgtttcaggatcattttcagctccaataatataatcagattcctgtagatatacaacaaagtcactcggtatcgctaatttctttattctagtagatctccttaatgttgtttcattatcttcttgaagaacttgttgttcaattggttgatcaactatttcttcttgctcctcatgaacaacttgatcaactagactatcagtagattgtggatcttaaatgataggttgcacaacacccggttgagctggaaggatattgttaataacaaccaatctaagatttgaagtggatggttgagtaactgaatgatctttctcagaaacaaaatctctggattgatcactcccactaattaagtcattctcaataaatttaatatttcttgattccataatccttgtactttgaaatggacaatacaaattgtatcccttagacctttcaacatattcaatgtagtatccactaatggtccttgggccaagcttcttttcttgtgggttatatattctcacttcaggcgggcatcctcaaacgcatatatgttacaaactcggtttccaactcttaaattactcaaatggtgtctttgggacaaccttagttggaactcgattcaatatatacactgtcgtcttgattgcttcagtccataatgatttaggaagcttggaattactaagcatacttcgtaccatgtccattaaggtttcgtttcttcctttttgccacatcattctgatccggagaaccatgcatagcgtactgggtaacaatcccatgctcttgaagaaacttcgcaaatagaccaggtgcttgtccattctccgtgtatctaccatagtattcatcatctctatcggatttctcgatcttaatttgctttcgtcattatttctccacttcggccttaaaaactttaaagacatctaaagctttatttttagaatgaagtaagtagagatacatatatcatgaagaatcgtctataaagatgataacttatttcggactacttgcgtccatgtctggacaacaaatatctgtatgtatgatttctaatagatttgagctcctctttgcacccttcttagacttgttagtttgcttacccttaatgcaatctatacgacagtaaaatccaaagcactaagtaccccttcatttaccaatctcttaattctctcgatagagatgtgtcctaatcttaggtgccacaacatagaggaatcatcattcataacacatcgattcatgccaacattaacatgcacgacatcataagtggtatcgttttgcaaattaatatagaaaagaccatattgcaaatcaatccaccatgtgttatgattaatcatattagattcataacaaactaaataggtaggcatacatttcttttccaaaccatagcttgaacttaggacaatctttcttcatgtgtcattcctttcagtcatcataagagaactctctctttgttccaattgcatcccccctcttcctgaacacacatggtcatgagttcattaatagaccatttatctttatgtgttgtcagatattttaaagggaccatatggtgctgggagagtattcagaataaaatgcaccagaaaggagtcaaacatgtccatctctagagtttttagttgagctgcaatatccctcatatgcatgatgtgctcacgcacacccctcagagtattgagcttcatggaagaaaatttcattactaaggtattggtcaatgtcttccctaaagtttcaaattgttcatcaatgtacttcaggagcactttcacattgtcatactgtttaattgagcccttaatatcagcgtatattttagtcttaatgaacatcacactgagtcggttggatctttcccatttctcatacagatcaatttcctctggttcactgttctttgtaattactggtggctcaactttcaagataacataatcaatgtccatatacactaacatcaacagaatcatttctttccatatataaaaataatattctctcaattccgtgacaacaattgtattaataggttgtatagttgcaaataattcaacatatatgcttatcattaaaattgaggcaaaataatgtatcatgctttaccaatgtaattcatgcttataaaattatgaatttagcgacataaaatttgtctgtgggctaaaattttaattcaattaaattcacataaacattacgataaaactatcaagttatatttcttgatccctgtgggcatatcaaaaaatataatttaatatcttatcctaattaatcatacaaaaatataatagaaattcctgtgggataatatctactatattatattatgattaattacaattaatattatttaccttatgtgatctagagactcttaatatataatttaaataattaaagttgttgtggctagactttaatcaattaaattataaagatcactaaatattatctaatttccaaaattaattttattgtaattaaccataaacaataaaattaaataatcaatcatttagattaatcaacttaatattacatgtataggaaaacataaattaatacatgtaatgacagaataacaatagattatgtgaacatatatcacaaaatattctcttataaatacaaattaatacatgtaataagtgaagtaaatggaccatatgcagaaaaggtttccctgaaagacataaactgaatatctaaacattattatttttataaatatatatatatatacatatatatatatatatatataaactgaatatctaaatattcctatctttatggaataaaagatataaactaaatatctaaatattcttatctttatggaataaaaagatataaactaaatatctaaatagcaataaattatgtgaacacatcataaaattgtcattagttcaaaatgctttatagccaattatttggttctcgaagatcaaaataaaagttcagcaatgcaaatagcgtatatgacaatagtaacaataacataactaaaaatacaattcagtgtcaaaatatgaagttttcaaatcataaactgtgtcacacaatatcactttaaaccaaatgtgaatgtgaatcgtgatacaaaaatcaagatttgaatacgggttaatttcacaaaactcaaagccacgaaattgaaacatgtttcattgatactattgtcttcgatcttcaaacgggttgactcgactcagtttcaaccaaaataaaaatccaatgattttctcaatcattttcaataccaaaatcaatgttttaatttacagaaaacttagaaattcaatttccatatgattccaaggctccttaataattaaaacgttcaaataaaatactcatatttcaatgaaacagtatttcacatacatgagtgttaaacaaaagcaaggcagaggcaataacgggctttgataccaaatgtaagaaaaactaaataatctaatcatgcttatatacaatcaacataagcaattaggttaagtgcgaaaaaaattaagatcataaatacctctcgccattgctattcttgtttgcttcgaagatgatttgcagttgtctgtgagtcaagtaatctgtaaacagtttgagtctccaaagtaatctgacttttggcttaatgatcatctatgctttcactatcactcacagatggtgtattgagattttcaaatagcaagcagaggggccttggccatagtgcacatttccttttataatctcttctcatcaaagagattgttttgatatgcataaaacatgggcttagttgctaaaaataagggataagattagcaacaacttaatcttaagaaaataaggtgagtggaccaccttatgtggttttgatttagtcaatcaaaataaaccaacagataagccttatttatagggataaaacactactagaaaaataggttttaacatcgccagtttaacatcggttactgataagaccgatgttaacaaacacgcggtggcagttttgtaaataagcggactaacttaacatcggttttaaagatttttcacaaaaccgatgttaaccttgaaaggttaacatcggttttcaatattttttagcataaccgatgttaatgatgaaacgttaacatcggttatcatgattttacgtaaaaccgatgttaacttaggaattttaacatcggttttctagattttaagtaaaaccgatgttaacttaggaattttaacatcggttttctagatttttagtaaaaccgatgttaacgatgaaatgttaacatcggttttcaaattttttagtataaccgatgttaaaataatatattaacatcggttctggtgtgggaaccgatgttgtaggtagtcgcgactctttaaatgcctttgtcctttccgaaaagcttcgtatcccttcactcgcgcccatttccgaaaagcttcgtcactcatcactgaagcgctatcacctcttcttctcctttgtgcgtctcttcttctcctttatgcgtctcttcttctcctttgtgcgttgttgagacccccactgaagcgctatcacaccatctcctcttctccagatctccttcaagccttgtcgacaaggctctgttctccgttgtgccttcacccatatcacggtccacatctcttcttctccttccgcgcgctgtgaccaccattgtcggccattattccgcttgctgaggtcgcggtcccccaaggttagtggttcgcatcgttcgtgttagcttcacatgtattttactttatttcatgcttgttggtgttgcttattcatgtgaaagagataataggtatatatgttgatgtcgttttgcttattcatcgttttgtatgtacactatagattaaaataccgaatacaaaacaagcatgaaaaacagaatacgtttgctaaactcagaattttttttttttaaattaaatttcgaattcaacacatatgaaccttttacatatacagaacagatctggcaaaatcaaatctagatttatacaagaaagtagatcagacaaaaactaaatctaaggtgtacttagggagcatctaattctattagaccttagatattaaatttcttttaatttgtcttcactatcatgattctttagccaaagaaatcttcttgaagcaccagcatgatctcaggctcgaaatccttttgaaaggatggcacttcagacttcttctagattttctaatccttttgtaacaaggcttaggcattgtatatggataagagagatgccaaagctaggcagagatgactagtgatgcaaattcagaaggctatttatcatctatttataggcagaatttagaaggcattttcaagagttataactgttggaaaatgttcaaaggtcatgtattcagttacctcattaatagactgtttatgatacacacaaaacgcttcaaattctacccaagagtcaaggatattcggctgttttattatgtcttgaatgggctaaacaattgtataaacattaggttattcaatttaatttgttattcaaattttaaatttttgaattgtattatcaaattggttggtgtatggctctggctctggtttttcatttacaggttgaagaactgcactaattaaaaaaacagaaacaatataaaaaaaaaaaccgacgaaaacaacatcggttctcttttgaaaaccgatgttaagtaatataacaacatcggttttcgttgaaaaccgatgttgttatattacttaacatcggttttcaaaagagaaccgatgttgtcaaaccatcgtttactctgacgcgttttcatgtatgacaagtctacatcggttattgatgtaaaaccgatgtgctttaaattttttaacatcggttttcataaccgatgttaaattgtcaactttcaacatcgcctgattcaacatcgggcgagaaccgatgttaaatggccgatttaaccgatgttgaaagctgtttttctagtagtgaaagtagttacaattagttgtagtgcttaatctaatattccaaaaaaactaggagaccatgggtaataggtttgcaacctctcccttgatctccacactcttagccacgtgcccctagtctttcaatgttcagataatatggttattcacatggcttttacttttatgccatttactagctctggcagcaaatttagttgttatcaagtcggctaaacccatcaatcgtttgttatcggctgaccaatcttcatcggctaacttttttggtgttaacataattgccccttcttttttgagacgtttgaaattcaaaatcttatctttggctttgaaaaaaaaataaaaaaaaatgggatgactaggcatattcaattcccaatcatcatatttgatttttaaaaattgattccaaattatcttcaatctttcttaatctctatcatttgaaaccaattcttgtttccaattttccctttaaaagtctcaatagttgttgattattcatgctttcttccttaagccactcttcgaaacccttaagcccttgtaaacctattatccaattagaatgtcttagtagttataaaggttttctttatctaataaaaatagaacaataaaaggtgaacaaaaacataagcaattagtggacaaaaagagccaaattcaaattaaatgaagtgtcggctatttgactacactaagctaacagtcacagtagttataaaagttttttttttatccaatgttcactctaatgctaccttatcctactatagtgctctaaccatgatccctcatgtgagagagtctaagttgcttaactcaactcctaatcccttagcaaatcaagttaaactacttggattcaagaacaaaggtttatcaaggctaacaaatattattccacccttagatataacacccattagataccactttcaaatcttagtaaaaaattatttcccaatgatagatcaactatgaaacatgttcatatggttgaccactaatgatactatcaaacatccctccatccctagatgagaaattcatgagatgctttgttcaaaaactcagttttcaagcatttcccaataacaataaaaacaaagaattgaagctaaggaaatcaaaccataaaacaagcaatcaaggaaagaaataataacataggaaatgacacaataaaaataaagattaattacagagtagcttagtacatcaatctcccaacaatggataaactaggctctcattgtcatgagaggcctcaaaattacataatggaagagagaaaatgaagggaaatggataaaaatgaaagataaaggtagataggagttctagtcaccgcatacaaccctaggtttatgcctccctttcgcaatcccaagagaatgtccttatataacgttcccaaagcctttgtcttgtcacatcagagtgtggtcttctcgttggtcgagttctttacaaattccaaaagacacgtgtgatttcactcgttgggcgagcttcaactcgtagggcgaattcttcgacaattgaaattacgaatgtcttttttcacttagtagcctttactcgttggttgagtttctcctcgttgggcaagtttttctagtgacttggtgcttcttcttcactcttgagcagccatgtgaccttgtttgcacaattactatcgctggaagagcatagctcgctgggcaagacatcatgaatgacatcttcaatcagtgatccaaaacctaaaaaaaagagtagaaacaaggagaaaaggaatgaaattttacttacaacctaagattctataaaactctattttctaactaaattgaggttaaattaaagcaaaaattcaggaaaagtagataattgttgcattatttgtaattcaaatgaacatgtgcacaacaattataagaacttaaaccttcagaatcgatgttgtctaagcattgatgcatattttgactggtgtgtgcttcttgtttggtgagaatgtttgtcatcactaaccaccttgcaatgcaaattttgatgatccttaagacattatagcttttgatatctatccttgactcatattatccccaacatgatgcttctgatcatactcaacttccaatatttgcaccatgtacatagctctccttctggtggtcctacttctgattgtagaatatatgtcatgaaaagattccactataggcatatgcttcacacctataccatgtgcctaaatttgtcttatcttaattaagaacactcaaagaaatcattagtagctaagttcagtcacttacaattttgcttcacggtggtttgtcatcattacaacattagcttttaaaggaactttttctcaacattcttccctttttttatgatgacaaacacttagcaaaatttgcacatactcagatatgtccatatccatccaagtctaagatctttctccatattgttgtgttatttatcccaggtcatccttatgtgtcacttctttagcacttgttttcattacttgagaatatattttttgctcttcatcaggaagattcaattcttcagtcttttcaagctcttgcactttctacagtgagggacttgtgattagtacttcattaagaggatattcaaaagcaatattaagatcaaagtaatgatgattgcatctatcatcaatctaaaattgatcttttttttccattttagaaggcttagtttttccttctaaactgtgtgccttaattgcttccttgtcaattgttccatatgccgcatgaacatcctctttttcagtaggtttttctgtagcataaatttccttttttgtgtctatttctggatctacttctatggtttatcttcttgaccacttttgctaattgttcctcctcctggacaatcatcactggtatttttctcttcttctttctatatgtatgcatagcagaggacacaagtatacaccatgatatataatagaaactatattacataaacaaaagttaaatacattaaatacataagtaaatctcttatacaccataatatacaacacaaatatattttattatgtgtatggtatatcaaacagtgaaaattgatttttgtcaaaccattgaaaagaaaaagagaaaaaacaaaaaatgagaagactaataatgcaagaaacacaaagttgtggagaagaaaaagatgactcaaaatgaaagagataatgagtttgaagttgaaaaaggagagtgtagaggaaaataacacaacaagggaggtcgaattgtgtttttagaaatttttaacctttcttaaaacaaagcactagttatcgtctcatgcagattttgcttaaaaatagatgatagaatatgtgaaaagcttgattagacaatgaaaagactttctcaaccgatcaaaaatagatgtaagatctaaaaataaattcaaacccataaggtttatactagttcgtttctatcaccgagacaatgttcagttcttgacaacccaccaaattctactaactttaaaaagttacaagtgttcttcactgtcacttttgcctcttacaaaaaccagctctaccccaagcttgatttcaacccaatattctttgtcaaaccaagccattgctgactctaaacacctccacttgctcaaagactaacaaattatcgtcttacagacagatgttacactcaactctttaatctattctttcaagatatacaaattttttgagagctttttactttatacaagaatttacagaaagctttaacaagaaagaaagaatttttcacgtaagattaatttgtgtcttgttcttcaaagtttcttctatttatagtcttcatctttgtgttcgttgtctctcaacaaatttaattcttcacttaaattctttgtttgaagaattttgaccgttgggggcaattgatgcttgtattaaatgaatgtccctttccatatgcagagagtccatgttgataggtttgcatgatagacacttcagcataaaatcacttcttctatcagagtaggtctacatagtagagcgcgccttttgataaagatcaacactttttagatcttcgatttcatttattcttcataggattgcaacaggtcttcagagaatgtttctacagaatagaatctcaaatataaagtattaaatgaaagtctgaaatccaacacttaaatgttatgccagatcatgcttgtgagaagtatcatctaaaacttcatatgctaatacagatcatgatctgatagcacattagacacaacttttatcatttgtatttattagcatctaatcaaaataattaagaattataatttgtctttaagacataaatattttttacttgatagagagcatgtggtgagaagctcaagagggagatagtgaagggttaggaagaaagaaaaggtcagggttataggtgggtgtaagaaagatgaataaagtatgggatttaaaggaaaatgagggaggggggagggggagtataaaaaaaaaacaaaaaaattggtggtgtaagacaaagaaaagaaaggtgtgaatagacctcccctaaactagaccggtcaaggctagttaaaaaatttgtttgtctaggataaactaacctgaatgtgcaaaattgacaaaaattaaaagctataaatttgcctttgagactatttatggattgaccaaaaatttcagaattcttaaaacgcctaatagagttcaaacacgtcatgaacatcaattaggtgctaatgatctcccaaagatctcctagaaaacctagaaagcagttagctagacactgaaaactagcattccagccaaatgaataagtcatattgacctatatatacatgggttttactgttttttttcagtggtatttattaaatttgttttttcatattgactttatccttttactaacttgaatattgaaattgttacaaataataccagcgcctttgccgttgtcaaagcccgacatcctttgctgtatttgcttcctttgatccacagtaaacttaatttttggggggttttcaattttcgaaaatataatttggagaaattattattaatgatttatactcctattatcccatatataattgctcgtaggttgttaaataatttatccatttcttatgagtctgtttggaagaaaaattaaaatttcaatccattcataatatttgagaacgtaacttttaacatgtttggatactctttgtggacaccaggcaccagctgactacgagcgtgatcgcattcgctgcaaaattatagcacatgaattattttcgacgggaagtgtgcgccacgcgcagcatgcggacaatggagtcactgtcttgcaatcgattagggaacagagggaagttgatgattaaaccaccatcaattaaaagcccaagttcatacctttctcaaaggtaatagtacgtgaattaggagatttatatatctatatatatatatataatatatatatagatagatagataggtagatggggaataaataatttaagggatcttttagaaatttttccttgatttaaaagaaaataattaattgggattttcaattcttgaaataattaatttattgactgagatttggatctgagcattgggagcataggtgcagacgggacaactaagcaacatgttctgactattgaacggtaaagaagtcaaagttgaattgaagattttgaaggtcatatttcattagtgaaagggaaattgcttttatgcgcctatcttttattgaattaaattaaaattttagtttaattaattatttaaaacaaaatatataattttagctttatttaaatcatttatgtttttattaggattttagcatgtttataatttcaaatttttctatttagtagaaagtatttactattcaaacagtgactaatttttaactttccgtcaagaatcttgagtgacactatatatatttttctcaataaaatctattttatatctgagatcaaaatttgaatcttgaacaatttggttaaggaacatcaaatactactaatatatcaattgttattggtgtttacatatttttaattttatacttcataaacactttttaaaaaataaaggttgaacgaattttatattcatttagatactatcaaatatgtgaattaattcacatatgattgttttaacttaattagttatctcaaggttttaattagcttaatgtaaataaaagattgtgatgattcgtataaaaaatatttattcaaatcatacaagataaaactaacataacttgataatggattattcaatgtaaatcaacatatattttgaatttttattaacataaaaatgctacaactatctataaatttataattaaataaatgaattaaccacacaaaatataagaggaagcaaaatttactggcttaatctttgcactccatcaacactagatatttcttttttaagagaaaaaaaatactacgtacctcctagtatcttttcatgttttagtcctttcccaaaacagtttatgttttagaattttaaagtatttttaatatctctctctctctctgtctctctctcactaatatgcccttatttaatatccattactaatggtgcaaatatcaaatattaaagtattaaataatgatattttagttcaaatataacaattttattttcattaaatatttcttaatttatgttcaataaccttaaacataaaaaaaataggaaggaggtagtatgtattgacaatatgaagtttttttaatagaccaagtacaatttgtgtgagacaatcttatttaaattgtatatgatcataaaccaatatgaactacaaatctctcatttcgagtacaatatgaattttattttttattatatcattcaatcataaaatattatatatgattttttttttctattatcactactcccttgtgtccttattacaaggtttgtttaacaaatttataagaattatgaaaattggttaatttagttgagaacattaaatttatcttaaattagtattattttttcttctaaaattattcttatgataaaaagcaacaaacattatattaatgagttgtgtttatcttattgccatgtcattttagaaatgactttaatcaagggcatttttgtaaaaaaataacacagaagatattttaaatccaactttataataagtactaactcattcttttaatttggactttagaataaacacatgatggaggactttaatattcacaccaaagcttattttccatgaattaaatgtataaaatcttttagcttaacaatatatatctattaaactatgctattattttaatttcaaccttatgataaacattggagggagtactttaaaattgacacaattttattttcaattagttaattgtataaaatcttttaccttaacaacgtattttcatcaaattctttcaatagcatttctactaatcattttttttattcaacattgtaacctacatacaatttaaatatgatcttacttcaaatggtgcacatgccataccatttatcgattaagagactttaattttttattctaaagatggatatatgccgagtaaacatcaagtttcgcctgctaaattggtattaattagtcgtaactttattgtacaagcttaggtatcttttcctttcaagacaactattttgaccataaaagattacttttatttcaaaataactacattaaatatcatgaatgtttataacaagatcataaattatttctataaggtcgaataacctcttttgggtatcctgaattttttattcaatgcttatcgagaatttctgactttacatgtgttgtttctcttctatctctctcaattttgccaaaacaagcaaagtaacttgaatgaaagcactataaatacacgaaaagaagtccagaatatatataaaaaaaaatcaaagaactgaaacctaaaatttaattaagtgggttacaatatactatcaaacactaaattgattgacacaaaattattctgaaaatcttgaatttgaatatataattatgttagatgataggaagaagaattttgtgatctgaatacatatggttatacttttttgtaaaaaagtggccggttacattatttataattaataatttgaatattaattaattatcttagccgttgaagctgcttttgggggggactataaaaaaatagagggcattcaatcactccgtttctgactgagtgattagcacaacgtctcagtccctttgatttcccaaattctgtatcatcactcgtcaccaccaagaatcgaatcagaatttggaacaatcagtgaattgagttttcatccctctcatctccacctttctccgttgagtttagcaaaaagagaaaaagaaggcaggcacaaaaagcaacacgagcattattacacagtacttgcttggttgcttcacactttcacagtctctctacttttcatttggctatatattataaaaacattagcaccctcttccttcttctatttatatatagttcattattctcagagtcttctttctctgaaccaaaaacaaaaacaaaaaccaccaactttgtataaccctgcagagttttttctgttgttctccctgctgctgcttttgcagtctctgggggattttttttgcattttttttatgtgtcaattggtcgtggctttcaagcggtggtggctattattattgtgctgagttttcatttttccaagaatcatatatagggtatggtcagattctgaagctccaaaattttcttgcatttaaagttttctcttccacaatctatcaacaagggattcatagtcatcactactactccatcactgcagtgttgtactaagttcaactaaaacaaagaaaagtagaagaaaaataggaaaaaaggtacaaagagcaaagacattcagaaggaggaattgtcatctgaattttcttccttcaagctttaggagaaagagacatatcaatcaaagttactagaaagcgattcttagtacttagtattggattttcttcagtttttgctctcttattagtgagcaaaacctatgcaaagagtctgtgcccacttattaaaatttttaattttttttctctcttccccacatctcttttcttttggatttgtgtggtggaatttgaagttctatttttgttattattaaattttattatgaattctgcaatggagttttgcagttatctggatctggggtctttcttggctttcgtttcctggggctgcgtttttatatcatagttttttgtctcatttagtgtcctttttatgtatttcagatccacatttagacactgctttttgtggataagggagagacaatgttgtctcagaagcaagcagaggaagctatagtcacaaacgagacagaacatgaagttggcagcacaagggaagaagagaaggagcaagacaactccatgttcagccttaagagcatcctttggcatggtggttctgtttgggatgcatggttcagctgtgcctcaaatcaagtaaatcacaacacccaataaactcaaatttgaaattcccatcaccaaaaaaaaaaaaaaaaaaaccaagaaaaagtaaagtaacactatttgtattagtagtcccttttagttcatgaattaacagtcaaatttggcatcttttataggtggctcaagtgcttttgacactgccatactccttctctcaacttggcatgctatcaggaatcatttttcaggtgttctatggaattattggaagctggactgcttatctaatcagtgtcctctacatagagtaccgcaccagaaaggaaaaggaaaacgtcagcttcaaaaaccatgtcattcaggttggtttgttgggttgtgttgccttctcaattcacttttcatcaccactggttcctaatctgaaaagagaaaaaaactacagtgactaaatagaatattgcactattctggatttttcagtggttcgaagtccttgatgggttacttggtccatattggaaagcactgggactagccttcaactgtactttccttctctttggatctgtgatacagcttatagcatgtgcaaggtagcacctttgcttcgttttttaaggcaacctggagtaatctaaagtgggttctcatctgttttttcaacaaagttttttgtttattttctctcatcttttttgttgcttgcttctttgatgcaaacagtaacatctactacataaatgacaacttggataaacggacttggacttatatttttggagcttgctgtgccacgactgtgttcataccttccttccacaattatcgaatctggtcttttttgggtcttggaatgaccacttacacggcttggtaccttgctattgcagccatccttcatggccaggttataaatcacttttacataaaaaaaataatataaaataattttacacaatggtttcaataataaattttttatgtttaataaatttattaatttttataataaatatttaaaaaatcttatcattaatataatataaaattattttatattattcgtatataataaatgaactctttcacgaaacacccttcaattgaaacagccaacaaaattgtttaatttctgtgatatgatattcaacaccatcttgcaaatcatgtttgtaggtggaaaatgtcacgcacacgggtccatcaaagctagtgctatacttcactggagccactaacatactctacacgtttggaggacatgctgtgactgtgtgagttcaccttttacttagcagcagcatgatctattcctccgtcttctttcattcgttttttttatgtttttccacactgcttctctttgcagcttttgccggttatctcggtcttcgagatctttgtgggcaaaaacaaaatcatgcacaaaaaaatactctcatgttactttttttggcttcaaaagtgttactaccttcttatctcaaggaaaattccataactgaatggccattatttctatttctgattgtacgtcctttctaaattaattaaaacttggaattataatgaaagtttaccgttttatttttttttgggggggagggggggttctgttcctatttgtatcttttgtccccaacctagacaacgttctagttgtagttaattccacgaacgttttaagttttcatatcacaaaagtacaataaagtcaaaaaccttaaaaataaattaattttttcaataccatattaacaaataaattctattatgggatatttaatgatttacttttcaaaactattaaaaaattatttgaagatatactatccaattttagaaatttcaatttcaatgtcaatttttattgtgattattatttttgatagatcttttgtgcacaaagtgataatggtgacaaatgttgcagagagattatgcatgcgatgtggaagccccaaaagttcaagtacatctacttgctggccactttgtacgttttcacgctaacgattccgtcctccgtcgccgtttattgggcttttggtgatatgcttcttaaccactcaaatgcattctctctcctcccaaagaatggcttccgtgacgccgccgttatcctcatgcttattcaccaggtaaggctacgtgtatgctttcttctctttggataaaagaagtggtaaagtcacgtcttattaaagagttattatgtttattttagaaaaatactaacaaaacaaaaccaaactcaaaataaatgaccattaatgctaacttttgagttgggtttgaacgtagtcaaagtactaaattttgactctacttttgacatattatcataatatatttttgtatgaattttttcaatattacattaatatccctttgataaatttaaatatattagttttataagattttttataagattttaaatttgttaaataatataataactcttcttcttcttataacaatataataacttattattaaaatatgaaacaaaaactttaaattttttatgttaagaatacattaaaattattttttaaaatatttgcttgaattgaagaatatcatatattttataacatttttcattatgtagtttgtatagaattcatattattttgtgattcttaataaaattcgattaataaaaatatatattagaaagaatattttactaactatcctcttcctccatgataagaaaacgaattcattataatcatggtctgtcaataatactattaggctttgtttgggagagggattttggaggggaaggaagggaagaaaaaggtttatgtagagacatttccttgtttgggagttttaatttttgagggaaaggatttgaggattttcaaaactcctatgcaatcttccaaagtcttaaaattgttgtccgccctatttgaggaatttttagaaggaaaagtaactaaaattattattataccagtcagtgttaataaaattactatcctaccctagtcagtgtaaaatatataatgtattaattttttaaatagggaaaaaattgtaaaaatttcttattaactctctatttctctctcttaatatatttttaactcccaaacaaggagaaagaaacttcccttatttttctccctttccttccccttccttccccttgaatctctttctttcccctcccctcctaactcccaaatcgccactaataattatgtgtatatattttaataatatatcattattaaataatagtgcagaatgttgtggcagtatattatttttacacactgacttgatcattaaaacatatgtaaggatttagtacaccgaatccaaacctgtcactttgttgtgctttgctcgttagaatgcaagtgcttaattttatgagctattatttttataaacatctttcataatttattttatctcttttattataccatttattttatttttgcatctaacttttctcctcttatccctcataattgtaaaattaaatatataaaattattattctaatagaatttttctgattttaagaattacactttctgtcacatatttctattattaaattcacataaaactaatgataaaaaaatcacataaacaatatttacgtagttatatctatatatagtaataatttatttttatatatatatatatatattattttcatatgtgcatgtttaattcaatttaatttagataattatatatttatttctctagatttaaatcaaaacaaacatgttaactatcctaaatttaacccttatattgccattttcccttcttcatatggtctaattgcaaaatgtttttgttcaccaaaataaacagcgggaaaacccacgaacctaccactgaaaagaagtggtaatcgttggaattgcataaaagcacatcagtaatttccttacccctgcttaattttttatcactgtcactatttttatttcctttccctaatgcatgaatgcagttcatcacattcgggttcgcgtgtactccattgtacttcgtgtgggagaaggtgattgggatgcacgacacaaagagcatttgtttgagggcacttgcacggttaccagtggtgatacctatatggttcttggccataatcttccctttctttgggcccataaattcagctgttggatctctacttgttagcttcactgtctacatcatcccttccttagcccatatgctcacttacagaaaagcctctgccagacaggtaaatcttcttccacgtcttaactatctctttgcttaccccaccaccatttcatgttatgtcacttgtgtcaagggtgttaatgagtgggctcacacttggattgtgatgctactctttatttaagttttggtaaaattaatctagaacattgaaatttaatttaaagagttaattaagggttatgttctgtcaatgtaaaagttttcatattattaatcaattagaaacacatacaacttttaagataattatgattatgagttataaagttaacttagtgattaaaaaaaagagttaaaggattgaaagtagaaggagaaaaaaaagtcgtgaattcaaatttctctattaattaatattataacaaatattaactattaatatattataaaaaatataattataatcaagccagtaaatttactaggtataatagtctataatttgattacggtatttatactacgaatatataacatattttctctaatttaagtgtctatccaaattagtcacaatcacatattttacattaaaatgtatatgacggtgtgtgaaactgatttttttgtgtgtaaacaaaaggcgcacctagtttatccaagtttagttgcctatactgtgtcaagacattattgtgtgacatctaagtgcacacatgcaattaatgatggcgtctttggagtttagataaaatgaaagaaaatggagaaagagaaatataaaggatggagtatcttttgtttagttgataaaggaaaaaaaatttaacagcgagggttagagagataaaagcgtataaaaagatagtggggtgggggagagtggtagcagcaagtgtacaaacgcatttaaggcttggatttggaaattttactggaagtattgaggctggtggtggatcattttcagttattcgctacagttggatgattgtattgtacgatgcttctgctgagctgtcggagttgactggtatctttccctataataactcaaattagggagagcaatgatatgaattttagttcatgtaggctgtggacagagaaataaatgatagaagatgaaaatgaagtggtaaagtttggtacgagagagtaaagttataagtagtgggcttatagtttaaagtttatatcttttctgttacactaaaattgatttttgaaggaaaaagattgtttttagggaaaaaaatcaaatttttatattaaaaaatcgattttctaaacaaaaaaaatcaatttgcttttgacacaaaaaatattaattttcatcttgttttcttaaaccaaataatacaatatatcaatttatttctattctattttttcattttcaaattatttctcttctatttctatctatttcatttctctcctctaaactaattaatacacccttaaagtgagagcaaggataaaaaaatctcaattattcaattgaaaattattccttgatatttaaatacatatatcatatatgataactctaagggttaatatattggtgtgaagttttattgtattcacatataaaaaataatttgtttagcagaataactcatgtccaattttatcaatgtgcaaaatttctgtgttaacaacaatgatgttggatgtatcttatgatctttttgacacgagaaaaaaaaaatacatatatgatttgttatgtgcaagtaagtgagttatttattttacatgagtatgctttttttcagttatttaatatttaagacttgaaagaaataattaagagtttgtaagtggatttaaaattataaatagtataaaaataatgaaagtgacaaatatcgatggatttgaatatagtatttgggggcctccccaggatatcttagtttaactccgtacaaccgttcgaaatcttgttaaatctcctaatttgcattattgctggtcccttagggatttttgtgagtaatacaacagtagtagtgtaggggcatcctaagcgatctaaagttttttttttttccttcaaattttgcagaatgctgcagagaagcctcctttcttcatgccatcctggactgcaatgtatgtcttcaatgcattcattgtggtatgggtttttgtagttggatttgggcttggaggatgggccagcatgaccaacttcataaggcaaatccacacatttgggctttttgccaaatgctaccagtgccctccaccagcaccaaaagttgtggcagcaccaccccctcatgctcatcattagagccaagctgactcattattcaccacaacatagtagagttcagcaacagtcacatttccctcaatactttgtattatacatgggggagaatggtgaaaaaaatatacacttcccccttcatatgatgtgtgtgctggctgggttttgcattatttttgtccttttttctttgttatatataatttccccccctctcttcttgtaagattagttgattaaaaatagtgtgtcaaaaatgttatgattcctttgctaagaaatgcacaaactaattaaattaaattaaacactatgttttggcatatttctttcgcaaccctctttcttttccttaagttgagcgatatgtaagattttgtttgccatttccttttgtgctcacagattgcaatctcattattagatttcattgtttccggaatatgccttggaaataaataaaaacatttgcaatatttgctgtcttaaagggaacgtggtttgagttcgcaaggttgtgacttgttcagtcgtccacttagaacttttagattcctctcattccttcatagtgagcaatggggcgtggaccctgttagtatgcacatggattgcatgtggcttcatctgcttgtcacgtgtcattatttcttgccgaacacattatatttaagatctgtatacccatgatacatgaacctcttcaacatatatatgacgtaccatatgttcattaacctgaattagtttataagtttatgtttattagcattaattttcatgaatgatatatcaagccatatttgaccctacccctttttccctattattaatattgactaatttaatgctatagtttcagttcggtgcacatgcaccggatattttggcagctgcagctgcattgttcagctctgatgcaagcaaagtaacatcaggacatgaacttgaaaattttttgccagattagaaacactatgatattctttctagatacagataagagaacggttagaatatctttaatattttttatcttttttcttttttaaaatgtaattttcctcccttattttttcaaatctataattttagtttacttattttttaattaagacattttatcatttacttatgaaaaatttgtgattttaatcttcctattttgtaattgaggcattttatcttccattttaaaaaatatgcaattttaattagtcatctttatcaatttcagattttactatgtatttttttaataaattaggcttgttaacaattaaaaaataatttttatatgaataacaaatagatagtgtcaatcaatgttttcatagacagaatatataaatcaacttttgaaattgatcaaaaggactcaaattaagaattttttgaaagtaaaaatgaaatgtctcaattataaaaatagagacttaaaattataaattttttaaaaatgaggatgaaatatcttaattaaaaaataagatgattaaaattatagattttaaaaaataagagaatgaaaagatgcattttaatcttttctttttttgtttacaattaattatggccttttgggtatgtgaaaaataagttaatatcatgatctattagcggcacttgctatttgtactcttgatttttcttgcacacttcaccttttatttttattttttttcgtgaactaccctctcctctcctccccccacccccctccccttccattaggaagaaacatacactcccctctttctcaattgcaataactcacgtctatgataacgtgactccttgcttctctctatgcttctacaattttttattttttatttttatctcaatgtagcaccacaccaatgatgactaatgtcaattgattttcattgtctaattgcatgaaaatagaaggaaaacaatgaagcaatatgcttttgtgatcgtagttaggtgatggttcgtaggttcatggtagctagtgacaagggggagtagtattggctatgtgcctaaaaccctcagtccacgtcttagtatcaaagccatgttcatcaccccaatttcactcctagtagaggcacaatcttgatgtgatgcagatagagaattctttgaaaaggtttttttttttttttataattatttttatatatattactgggaaaaaagagagtaaactacagcgcacccaaccacgacaaaagagactcctcagcatcgaaagctagaagaacaactacacagcatcaaaattataacaaacagagatgttaaaatcccttgttgacccattttagcaaaatagtcagccggggcattagcttcccgttgactgttgacacaagagtgaacatgtttgttaaaagaaaaattcagttagatttgttttatggatagtcttgtcaagtttcttataataatttgtcaagtttttaatatgttgctcgatcatcaatatttttttcatttgactctaataacttattggtgtcatcattaatttgatttgttgaatattctttaacatatgaatagaacatatgaaaaacgaagagaaataattggacaaaaaaattatgaaaataaacaatagatgttattaattgattaatatttatttaataccatcacgaactaatgttattcctaacaatcatttttcttcaataaattatagtaaataaattatttcttgttctgatactgttgcaagcaagaatttaccacgtacgtcgcatgaccacgaacatctataacataaagtcaattatcatatatatgtaaaaatataattaactcaattataaagataattataaaaatttaaaaagagatcaatatgttataaaatagtgaataccattgttgtcatgaaccgacttgatcatgtgattcatgtcgaaacctgtaagacaaccccatagatagtatcgatgggtgttttacaacattttttcataaacacatattggatacaaaatgaaaatcaatgcataaggtaagcaagataggtcacatttgagaccacatgtgagtttactagatacactattcgactcaatttgtacaaatggagaattaaaatcagcttttgcaaagtccatcacaagcatgaccataatcactactctagtaagtttcatctcattctttgccatcattcttctcaaagttttcacaatctaacttaaaattttgtatagatgttgatttcttgttgtgatgttttaaggaaaatgaacaccaatttataggaaaaaatatttttgtaaaataagtttaataagacctataaatatttcaaataataaactcagcacaacattaattcttagcctctggacaaaaaaattaatttgtaattagtactctcaagatcaaatattgtcaactagttttgtcaaataaatagtcttttttttggatcgactattattcatatgaaaaatattttataattgtcacatatttatttggtcaaattgtgtcttccttttgatagaatacaattagcataaataatctcataataatatgtatgtaattttaatcaaatcaattttaataataggaattattttggaagtatattgtgcatgtcagtcaatttaattaaaaatttaccagacatgcaaacaaatggagagggtccataactactaaatttgcacccaattgtgccaaccataaatatgaaacattaatcacggcaagtaaataatacatccataaatgatgttatcactctatatcaaatttattatagcatcaccgattcatgtaacaagaaagcgcaagacacataattcatcaaattttttttgtcatgtatgtaatatttaagacgatagaatccaaggatttccaattgcacatatgctttatataaaagtatatgtctctaactttgtattgaacgtaatcattttaatataagaaaaaactttaaacaattcttaacaaaaagattccgatattaaaataattgaaaaacttgaatactaacaatcaacaatgaagatatattttgatatcacttgttggaatatctttaatctttaatctttatatttattctttatgcagaaactaaaaatttgtaggtgcatatccttgaacaaatcaccaaaggctctaagatctataacatgtttaagtattaaatattagataaaatactttgatctatagtttggtttctgatcaaagcgttctccaacaactgttaaattacgaacaaccgatgacttaatgtttcttcctcaatcgaagtctctttattcctctgtaggatctttgtaactcttaagatgtggataagagaatttatatataataacttggtatattgagaatcataattttttttataacatgtaaacctaataaaattcttattatttctctaatgaatcaatattaacatctgttcatttaagctcatttcatcttatttaataatttaataggtacattttatttaatcacataaaataaaatcactaataataaataactaatataattatcttataatattaaatcatattaattattaaataaaaatttcatcatctaattaatatatatatatatatatatatatatatatatatatatatataaaacaagcatcaacctagattgaaacatataagtcaagctgaccctattctccatgcactagataacaagcaaccatgttgttggataattttcgtttttaattggttgatactttccatttttatttaatagatattttctgtttttatttgattgaccaaatcaaataatatttgatggcttaggccaaacccattgtaaacctaattcatcctataaatagattagtaagggtggaggcaagataaacagaaatttgagagcctcaagtgacagtcttgagtgccatatttgagcaagttatcgtgcctgcatatttgagagcttagagtgaaacattttgagagtttgagtgaccaccattgttggagaggttgagtgcaccaccacatttgtgtgtttttgattcattgtaaccgattattgttatagtggattttgatactggactaggtcccgtgagtttttccttttctcacattgagaaaggttttctcatgtaaaacatattgattgtctctctcgctcccttttgattttattttcgcttccgcaatttgatatttgagggttcgtgatatccaacagtggtatcaaagcccgggttcgacgggttctgaaggagttgagatggagaccagtggcataacgcacgacggagatatgttcaagttgatcgcagataacttcaaatattggatgtcgatgatggaggatcatcgtatctgcaaggatttatatgatcccatagtcctggaggagaagccgactgacaagtcggacagggactgggagatcttgagtcgtaaggcgatggccacgatcaggaaatacattgacaaaagcctctttgaacacgtgtcagagttcatgaacgcgtacgagttgtggaacaagttagagtccatgattcaaaagaagactcccaggaacaaagcacacctggtctgctgccttgtgaagcttgaatacaaggatgacatgagtatgatcgagcacctcaacacctacaaaggtattttgaatcaactgtccaaagccaatatgaaaattgatgacgagatgcaggctttgttgttgctgagttcgttaccggaaagttgggatactttggtggtaactttgagcaactcggttctagaaggaaaactgccgatggatgccgtgacagacagcctccttaatgaagaagctaggagaagagaacaaggtgtatctaccacgtttaaggctaacgttgctgagaatagaggaaagaccaactcccgggatcgtggcaagagccgggattgaggtggacgagataggtctagaggccggtcaaggtcaaagcatgacttgaagtgcttctactgtgggaaggtaggacacaagaaaccagactgcaggactctgcagaatgatgaacagaacgactgtgtgaagccagatcaaattgttcacataagaagaagtgatcagagcaccatggcagtggccgccaacccgaatgccgagatattcctcctcactgaggaaatgttaaacatagcccataattactgcacctggattgttgactccagtgcctcgttccacgttactccacatgagtgattattctctgcctacaagaagggagattatggtgtcatgaagatgagaaatcaagtgaccagcaggattattggtgttggggatgtaacctgacacagacacaggatactgggttacgctaaaggatgtgaggcatatacctgacatgagtttgaatttgatctcggttggaaaactagatgatggtcagtaaattactttggagaaagtagatggaagctgaccaagggaagcttagtcgtggcccgagaaaagaaggaagactccttgtatgtcatgtaaggaaagaccaatggcggttctgtcctagatggaccaagcttggagctgtggcacaagcgcctcggccacatgagcgagaaaggactccagattttggagaagaaagtgctattgatcgggttaaaaggtcaactattggagagttggtcgcactgcctaactggaaagtagcaccgggtttcatttgtgagactgaatcaacccaggagacagaggtgcattcttgacctcgtccatactgatgtttgctccatgtccgaaagatcactcggaggagctcgtactttgtctctttcattgatgaccactcccgcaaagtgtgggtttatcttctgaagacaaaagaccatatactccaatctttcaaggaattccatgccatggtggaaagggagactgacaagaagttgaaggtggtcagatctgattggtgagtatcgtggtccctttgaagcttactatagagaagttgggatccgacttgagaagacaccccccaagactcctcagctgaacaggctcgctgagaggatgaaccagactattgaagaaaaggtctgaagtatgctatcaaacgccaggttgttgaaagcatattggggagaggcagtgagaacaacagtggatttgataaatctctcaccatcgaggctgctggatggagagattccagaggaagtctggacaggtcagagagtgacctatgatcacctgagggtgtttggatgccgagccttcgtgcatgtccctaaagatgaaagggcaaagctggatgtgaagacgaaggagtgcgtatacctcggttcgccaaaaatcgagtttggtttcagattatgggatccaatcaacaagaagattgtgagaagccgagatgtagtcttccatgaggatgagaccatccatgacatcttgaagccccaagttcgggttactgtccgaagtgaagaacctgtccctcgtgtgcgtgctgaagcaggggcgaaaccaatgaagaaatcgcagaaggcgatattgaagatgatgaccagcaagaagctgatgatgccgggatccgagttgagaatgcagagccgagttctgatgaggctgaggaagaacagccgagataccccactagagaaagaagaccttctataaagtaccctgatgatgaatacaccatcattgctgaagatggtgggccttagagttatgatgaggttgtgatgagctcagagaaaggagaatgggagaaggccatgcaggatgagatgaaatccctgcatgaaaaccagaattatgagctgaccgagctgcctaaaggaagacgagttctgaagaacaagtgggtgtataagatcaaacaggaggagaacgggtagaagccgagatacaaagcccggattgtagtgaaaggctgcaatcagaagaaaggagttgattttgaagaaatcttctctcctgttgtgaagatgacctcgatccaatctgtgttggccatggcagctgtaatggatcttgaggtagaacagatggatgtgaagaccgcattttttcacggtgagttggaagaggagatatatatggaacaacctgaagggttccaagcttcaggatgcgactgcatggtatgccggctgaagaagagtctctatggcttgaagcaagcacctcggcagtggtacatgaattttgattccttcatgacagagcacaagttcatgaagatggaagctgaccattgcgtatttgtgaagaggtatgagaatggagactttctgatccttctgttatatgttagcgacatgctgattgtagggcaaagcaaagagaagattgctgccttgaagaaggcattgagcttatccttcgctatgaaggacctcgtccctgcaaagcagattctcggaatgaagattatccgggatagaaagaagaagctactgtggctaagtcaagagaagtatgttgaaaagattttgaagagattcagcatggacaaagccaagacagttagcacccccttggccaaacacatgaagctgagtaagaagcattgtccgaggtctgatgaagacaaagacaagatgctgaagatcccataccaatctattgtcggaagcttgatgtatgcaatggtttgcactagacccgacctggcatatgcagttggtgtggtgagccggtttctatcgaatcccggcaaggagcacttggaagcagtgaagtggatcttcaggtacttgaaaggtacatccgatttatgcctccgatttggagaaggtgaagccgagctacaaggctactcggatgccgatttggggggagattccgactcgaggaagtcgacgactggaaatttgatgaggtttgctggaggagcagtctcttggcaatcaaaattgcagaagtgtgtggcactttcaacgaccgaggtcgagtacattgccgtgactgaggcaagcaaggagatgctgtggatgaagaagttcctcatggaactcggcaatgaccaagaaaagtacgagctgatgtgtgacaactagagcgcaattcatcttgcgaggaactcgacgtatcactcccgcaccaagtacattgatgtgaggtatcactggatacgggatgcggtggaggatgggaagctcacacttgggaatgtgcataccagtcagagttggtttgacatgatgacgaagccggtatcaacaataaagtttgaagattggtgtgaaggagctgggctgaggaacttggcatgatgaagccaaggtgagaaggccgagtttgaagttgaagacctcggtctcattgaaaaacggaaggggagatttgttgcataatttttgtttttaatttattaatactttccgtttttatttaatagatattttctgtttttatttgattgaccaaatcaaataatatttgatggcttaggctcagcccattgtaaacctaattcatcctataaatagatgagtaagggtggaggtaagatacacaaaaatttgagagcctcaagtgacagtcttgagtgtcatatttgagcaagccatcgtgtttgcatatttgagagcttagagtgaaacactgtgagcatttgagtgaccaccattgttggagaggttgagtgtaccaccacattggtgtgtttttgattcattgtaaccgattattgttatagtggattttgatactgaactaggtcctgtgagtttttccttttctcacattgaggatggttttcttatgtaaaacatattgattgtctctctcgctcccttttgattttatttccgcttcggcaatttgatatttgagggtcgtccgtgatacccaacacatgttgtgtcacgaatggtaaacttgaaaatcaacctgcaatgaaaatcatactttctcttggctttcttcaattggtcgtttgatcatcgtagtcgtttctttaaaaaaggaaaagcaggggtaatacttgatgatttgatttgaagtagaggatgaatgatgtggagttgaatggtttaaatacttgatgatttgattttaaggattaattatttgattttgaagattaattagtgtgtatactagatgtgaatctttacttgtaaaggtttaaaggaattagatattatttatattgaggattattagttagactactaacataatttttctgtggttaaggttattctctggaaatgcataagtttggtaataatcttacttgattaaggtatggtggtgtaaccatacttataaaagcttattggataagatatggtggtgtaaccatacttatgatatatatgatgatatgatctatgttttacctatgcatttgattgtttcatatgtatgattgatgtgatttcagcttattacaatacttcgtttatatttcttcactactccaaggcttcacggaacctgtccatcattgccatctaaaaaaacatgaaacaatccgggtgagaaataaatttctcagtaggcaaagctaaatcccaaccctatcattaggttagtaaaataaataaataaaaatcaagcacatccacaagcaatatgcaaactatatgaatgcatgagatgaactatcccagggcaaatggctcccacatatcgtactgtatgtggccacgctgagcgtggtcgctgctatagtcttacgcaaatatgcatgaattttgtcatatatcgttgcctatgggtactacatatcgtactgtatgtagcatcagattctgtttccccaaaacctcgtagtggacttggaaacatggaaacatgaatccacctatcttaatcacataaatcatccatatgaaaaaatcaaatgcataagtaaaacacatattatatcatcatatatatcataagtatggttacaccaccatattttatccaataagcttttataagtatggttacaccaccataccttaattaagtaagattattaccaaacttatgcataaccagagaaataaccttaactacagaaaaattatgttagtagtctaactaataatcctcaatataaataatatctaattcccttaaacctttacaagtaaagattcacatctagtatacacactaattaatcttcaaaatcaaataattaatccttaaaatcaaatcatcaagtatttaaaccattcaactccacaccattcatcctctacttcaaaaattaaattacaacatatccataaaaatataaacagacaatccaaaacatcattaaaatcaccttaaaagatcatcaaatagacttccatacttcactaatattgatgggtataaatcataacctaacttatgacttgaatcaacatattcttatcaaagaataaccattaaacatcacaaaattcaagcctaaaatcaaccatgaatcagcctactaaagtatataaattaatccaaaccattgattaactaaagatttaagcttcacctacctcaaataagtttgagtcttgatatccttctaagcttgttaaatccttcctaaggttgtttgcctctacacgtgatttcttcaaggtgacggggtttacttgatttaagctttgaagggaaagatgaaatgaaatgaaatgaaatgaaagtggtgtgagggagagagttcacgtgaggtttgaagaaaggagtggtcttggaattggtttgcacttaggttcctcctctagttcttctagcagccatgaattcctattcactttcacaaaaatactgaggtgatcaagctcaatataaagttaaagtgtgtcagaattcaataaacacaaacaatcacacagaaaagcacacaagaatcacacagaaaagcatagttagtccattcccctcaggacctaacaggattaactgctctgataccaaaactgtaacgacctaaattcctacttattctttattaattttattcttacttaaagataaattttctaagaaacgtataatagtaaaaattctaaagcgtaaaatttgcaaaaaaatttgctaatcatatacatagccaatgtctctgatacaaaagtttagataatacaagtacactactttctcaaaaattcagcttattacaatacttcgtttatatttcttcactactccaaggcttcacggaacctgtccatcattgccatctaaaaaaacatgaaacaatccgggtgagaaataaatttctcagtaggcaaagctaaatcccaaccctattattaggttagtaaaaaaaaaaaaatcaagcacatccacaagcaatatgcaaactatatgaatgcatgagatgaactatcccagggcaaatggctcccacatatcgtactgtatgtggccacgctgagcgtggtcgctgctatagtcttacgcaaacatgcatgaattttgccatatatccttgcccatgggtactacatatcgtattgtatgtagcatcagattctgtttccccaaaacctcgtactggacttggaaacatggaaacatgaatccacctatcttaatcacatcaatcatacatatgagacaatcaaatgcataagtaaaacatagatcatatcatcatatatatcataagtatggttacaccaccatatcttatccaataagcttttataagtatggttacaccaccataccttaattaagtaagattattaccaaacttatgcataaccagagaaacaaccttaactacagaaaaattatgttagtagtctaactaataatcctcaatataaataatatataattcctttaaacctttacaagtaaagattcacatctagtatacacactaattaatcttcaaaatcaaataattaatccttaaaatcaaatcatcaagtatttaaaccattcaactccacaccattcatcctctacttcaaaaattaaattacaacatatccataaaaatataaacagacagtccaaaacatcattaaaatcaccttaaaagatcatcaaatagacttccatacttcactaatattgatgggtataaatcataacctaacttatgacttgaatcaacatattcttatcaaagaataactattaaacatcacaaaattcaagcctaaaatcaaccatgaatcagcctactaaagtatataaattaatccaaaccattgattaactaaagatttaagcttcacctacctaaaatgagtttgagtcttgatatccttctaagcttgttaaatccttcctaaggttgttttcctctacacgtgatttcttcaaggtgacggggtttacttgatttaagctttgaagggaaacatgaaatgaaatgaaagtggtgagggagagagttcacgtgaggtttgaagaaaggagtggtcttggaattggtttgcacttaggttcctcctcctccctttatatagtgttgaaggaatgattacttagagaaaaatctcataagccatcattattcctttacaagtgtccctacacttgttataatcttaaggattccttcctttcttccttccaagtgtcctaccacttggcatgatcttaaagcttcttctcctttgcttccaagtgtccaaaatcatgaagtttctccatttctcttgtattttcgtggagtagctcattcttgagtttatcccaaacctgtgaacagttcagggtacttctttctcatttctgattctagctcccaggtacactcttccaaatgtccttgtccccaagctacttttaccagtggtacagacttatttcttaattgctttatttctctatccaaaattcttgtcgggggcaagctcatagttaaattatcttttaactgtattgattcagattctaggacatgacttggatcagaaatatatttacggagttgagagacatggaaaacattatgaaggttagaaaggtttggtggtaaggctatttgggaaaaccctttaataaacctcctatagtaaccagctaatcctagaaaacttctaacctcagttaccatggttggtctctcccaattcataactgattcaatcttactaggatcaactgaaattccttccttagaaacaacatgtcctaaaaatttcacttccttggcccaaaattcacacttagataatttagcatacaatttcttttctctaagtgtctataatactactttaagatgttgttcatgttcttcttctgattttgaataaacaagtatatcatctataaaaactactacaaacttatctagataagatctaaatattctattcatgtattccataaatactgctggagcattagttaatccaaaagacatcactaaatactcataatgcccatatctagtcctaaatgcagttttaggaatatcttcattcttaaccctaatctgatggtatcatgacccaagatcaatcttagaaaatactattgctcctcttaattggtccataagatcatctatcctaggcaatggatatttattcttgatggttatcttattaagctgtctataatctacacaaagcctcattcccccatcttttttcttcactaacaaaactggagctccccagggtgaaacactaggtctaataaatttcttctccagcaactcctctaattactttttcaattcttctagttctctaggggacatcctataaggtgccatggatattggtccagatccaggaattaaatcaatagagaattctatttccctttctgggggtatccctggtatctcatccggaaacacatctgggtattctcttaccacgggtattttagagagttcatcagttgactcagttacattagctgataaaagaacatacccttgaatttcattcttactggaatagaaagcaatggagttcaaatatagacactgggtttgactgttttctaaaatttctgaaggtaaaacaatggttttatttgaacagtctaacaatacatggttagctgcaagccaatccatacccaaaattatactaaacccagtcaaaggaagacaaatcaaatttgcagaataaagtttatgatcagtttgaaaaacacaattaagacagatttgacaagtattaacaggtttaccagtaggagtagaaacttgaagatcataaggtaattgagataaaggtaatgctaattgtatagcagaatcataagagatgaaagagtgggtagcacctgaatcatataatacagttaaaatagtatctttaattttgcacttaccctcgataagattttcagattgagatgcctctgctgcattcatggtaaagactcttccagtatgttgaggacgtgtagtgtcttgggaactttcagctctgcagttattagcatagtgtcccatctttccacatttaaaacattgaacactattgcgattgcgacaatcccttgccaagtgtcctatctttccgcatcgcacacaagtgggttgcactatggggcatggcctatctccatggatcttgtgacatttgttgcattccctgcctgaattctgcctggtctgaaattttctttgcttaaaattattcttaaatttagaaggctgaggtcctaatttctttatgaaattattacttgactctcttttctcagcagacctctttttatattcttctattaatctacacttgtttatcagaacaccaaactccctaatttctaagggtcctactttttctaacatatcttccctcaatcccccttcaaacttcatacacttctagtgctcattagggttatattgataggtggaggaaaatttaattaattcttcaaatttagctatatattcagacacactactattaccttgttcaagtctaagaaattcaagctccttagcatttctcactgatatgggaaaatacttaccatagaaggctatcttaaacacctcccacgtaatctctactccattacctgccaaaatttgcttatgactgttccaccaatactcagcttcagattgtaacatataagtagcataggttactttctgttggtcagaacaacttaatacagtaaatatcttttctatttctttaatccattcttcagccatgtctggattaagagtccccctaaagactggtggattagactttctaaactcaacaaacttatgatattctacatcagtttcctggcttctattatttcgattagaattattattactatcttgatgattattattattctgattcatttgcatcatcatttgagtgaataggaattcatggctgctagaagaactagaggaagaacagcaactcaagccggtggcaacagtgaagaaataaatattcttcatgagatgctagcggctatgcaagagcaagcggctgctgtaaatcaacaagcaactgcggcgtgttgtaacattcctaattcaggcatgttacagttgccccaatttggtaaataaggcccccccgctccgcagtttcttcatatcttggcttccggtgttctctgtctctgctaaactgccaaccattctggtattttttggttttttcagagatttttgaagttgttttgagtgacgagaagcatgagttcaagtggtggttctgttcgcctttgaggggttagggtttgctgggtagggttaggtttcatggtcatgtgaccatgaaacctagggttgggttgtgacatttatggtatgtgacgtttgggctagggttgggttagggttggtttcatggttttggttgcatggtttagggttggtgggcgtgttgaatgacgccctaaaacccaaacaccatgtacgcctgccgacacaaccctaacccctcacctgaaaccccaaccaatccctaaaccccaaccaatccctaaaccccagccaaaccctaaaccctaagttgaagtggtgatgtgacattagtttgtggttaagggtttagggtttggtgggcatgggatggacatggatgtgtagttgcttttgaacatatggtcttgaaggtaagatcgatgttgttatttgttgttcaactgccttcatcagtcttctatgaagcctattgaagagttatgttgctctaaaaggatcttcaattaacatcatgatctttcgtgcctccagacattcctgtatgacttcaatggagatagattttggtcctccatatatctcttctaaacgtttgagcatgtcttcctctaatatatcataatgagtaataatgatttgttcatcggcattagaaattggccttggatgaaaatgagcatttccatgatctgtctcaataacatcatccttatcttctacaagagctgacagaagcatggcctcctcatgagtttccctttctttaggatccatgtctttagaaatagtgacagcttccaacccctaaaccccagccaacccctaaaccccaaccaatccctaaaccctaaaccctaaacccaagaccctagccaaaccctaaactccagacaaaccctacaccttaaaccaaaccctaaaccccaaccaaaccctaaactcaacacaaagccctaaacaccaaccaccatgtacgcctgccgacacaaccctaacccctcacccgaatacccaacccctaaaccccaaccaatccctaaacccaacacaccatgtatctcagcttccttccatcattcaaaatctcaaagtttcttctttttgatcagtgattcactggccactagatccagggattccgcctacattcaaaatctcaatgcagagtgaagagtgaagagagtgattggtgctgtgtatatgatgatggacttgccacaagtggaaacaattaatgaaaaactcattttaacccgtgactttatttgactccccaggtcagtcaagtcactaattcttcgataacagggtcagcgtgattttttcttgttgtgttttgctgcttatctgtctatatgatgatggacttggcacaagtcaaaacaatgtacgtcgaggttcatgcttttagggtttggggggttcaggttaatggttaatgatttactgttgatgttggttaagttgatggggcaggcatagtagtccttgccatatcgtgagttcattccgcatgagccatggccacaagggaactgtatgttcctattagagggaatagttgaatcttttctaggtgagaaaggtttggttttggggcatttggaaggacagcactaacaccaccgtcctcactgatcacagttggaacaagtgctttgctgcattcgttttgccaagttgttgaaagcagtttgcggggattaaagggttactctgaggactatgagcatgagttgatgaagaaggtgaagcagtttgccaagttgaaaccaaaatcatgaaaccaaccctaccctaaccctagcctaaacgtcacataccatagatgtcacaacccaaccctaggtttcatggtcacatgaccatgaaacctaaccctaccccaaacctagcccaaacgtcacataccatgcccaccaaaccctaaaccattaactgcaaaccatcgtcacatgaccatgaaagctaaccctaccccaaccctagcccaaacgtcacgtcccatgcccaccaaaccctaaaccattaactacaaaccatcgtcacatgaccatgatagctaaccctaccctaaccctggtccaaacgtcacgtctcatgcccaccaaaccctaaaccattaactgcaaaccatcccatgccacatgaccatgaaagctaaccctaccccaaccctggcctaaacgtcacgtcccatgcccaccaaaccctaaacccttaaccacaaactaacgtcacatcaccacttcaacttagggtttagggtttggctggggtttagggattggttggggtttaggggttgggtattcaggtgaggggttagggttgtgtcggcaggcgtacatggtgtttggggtttaggacgcgcccaccaaccctaaaccatgcaaccaaaaccatgaaaccaaccctaacccaaccctagtccaaacgtcacataccataaatgtcacaacccaaccctaggtttcatggtcacatgaccatgaaacctaaccctacccagcaaaccctagcccctcaaacgcgaacaaaaccaccacttgaactcatgcttctcgtcactcaaaacaacttcaaaaatctctgaaaaaaccaaaaaataccagaatggttggcagtttagcagagacagagaacaccagaagccaagatatgaagaaactgcggagcgggggggccttatttaccaaattggggcagctgtaacatgcctgaattaggcatgttacaacacgcccacatctaggcgtgttgtaacatgcctaattcaggcatgttacacagccccattttggtaaataatttatgttacacaaccccatttttgtaaatagttttgaaacagccccttatcggtaaatattttgtaaaaaaacaccatttaggttcttttgcctaactattagtatttcataataataaggaagttgataaataaataaataaagcatgagaaagacattcacgtgcactcatcatatgacaataattatgaaatatgttttagatacctgataaactaataaattatgtttaataatttatcaaatatctaaagatataacgataataaaattttgtcccactaaacgatgtcagctacaagattaacaatatactagttatcccaaccgcgaaaattgtggaattaaggccattataagctacaagattaacaatattctaaatatttcattaattaataatttaataccttccatatgtctctagggactagttagtttcttagagcatctttagtgtgcaaggtcttaagtaaagatcttgaactcaagatctgatctttattagatctcccaataaaggagttaaagagatctccaatatagaggatgatttcttataaaagatctcttagagcatctttaatgggagatccaaatttgagatcttaagttattttatggtggaccccacaaggccatgtacgatggaaaatcttttaagatctgtaacattttttgctttagtggtagatctcaaattgagatcttagagcacctttaatggatcccacttttaaattttttaattttgattaaattaaatttaattaattaagtaataaattttaattaataatgcaatagaaaaaaaaatattttaattaattaagtaataaattaattttttttctccccccctttctggaatcttcccgttaaccccccccacccccccgttcacttttttttttccactcacctttcctcactcactcacgttgcccctcccccccccccccccccaaaccgtcccccccctcctttttctttttccattcccttccctctctcaccttccccctcaccccctccccacaatttttaatttttttttctttcttcttcttctcccccctctccccctctcttttcttttctttttctttttcccttcccaccccccccgaaaccagacgctctcccccctgttttctatttttttcccctttcttcctccccttccccgttcacccctccccctgcctcattttttttttatttttttccctttctttctcccctttcccattcctttgttttttctctttccctcacggtcatcccctcccccaccgcatgcttcctatcggtactccatcaccacttcgcctccgcttccccctcaggtatggtttcttgttgtttttccgttttcttccccgctcatttctgttacaacattaagtggagatcctcgtggagatcctcattcctcctttagtggtggatttagagaagcacagatctctctctaagatccagcactaaagttgctcttaagctgcacattgtttaaaaataaataaattctttttttttctctctccttaaaatctcaaaatgagatttatcattaaagaaaaaaatggaagagatcttgagagatctttaatcctatttgacactatgggatttaccaaaaaatagtttaaaatctcaatttaagatctaccattaaagatgctctatacattaaacgcctattacttctcactattatttcttttctttctctcaatgttgattaacatatgacgtgtctaacaaatattttccttcttttaatacttttgatgtagacatgatccaggtgcttattcattgtttatgaaaatttacatattgttttattctcaataacttaatggaaaatgttcataagtgtcttaggaacactaattaattagggaaaaaattctatgaggatgaaaaaataacataatttctatttttttccattatgaacacttaacaaaatcctaacttaatactaatatataaaggaaaggaaagaacagccttcgttacctaatggttcctcctccagctgcagtggttcattattattttccgcagaagaatcatctgagtcatgttccaatgtttgctcgaacggaattttttcatcctccggacactcttcgttgtatgcatatctaatggaatagtacacaaaagcgagaaggaacacaccgttcaatattcccaacatcagatagtaacggtcgaaacggctagcgtcagcggtttctctgatccagctactgaacacgactggtataatgaggagtttgccactcccaatcaccagttccgtaacaaaagaccacattgaattcgatacttggccatggaacaaactcgccaacccactttcaacaagtccctccgccgttcccaacagcgaaaattgtggaattaaggccactgccgtattcttgccagtaaccgacaacctacgaacctccatatgccatgctacgaggctgcaaattaccgcacaaaccatgccaaaaacaattcttacaattgcggctgcatttgtttttggcttcctaccatcgttagctttggaatttctcaaaaagcatcgaaatgcgaaactgataaaaaagaagatgaatggtgacataagtttcacgccttcattgatcaaaaaaagaatacggatatcattaccattggtagtgatatatgatgccatattgcggcttggttgtgctacaaagaaaacgttacctgtggccacgagtaaactgtaagcagagaaggtaaagccgaggtagatcataggaacaaggctcttcacttccctcacttcttttactgtgcaaagcttcccattcttttcttccgtctcgggactccttcttctgctttaactatagccgctttgtctaaccacctgaataaaggcggaactcgtggcaataaccttaatactttaccatgtttataccaatcacggttctgcttattatgcttatgatccttccagtaataacaattcgatgaggttggatactttgaatccgtttcccaaaagctgccttccatactctaaagatcatgcgtagattgctttcagcactcaattcttcgcgcctataccactcacaaccaaagaggaaaaacatgtaagtccctcccatgagaattgccccaaatctaaacctgtgatctacgattcatcatgaactttaaaggcaatataagcggttttgatatatccaacaatcgatggagcgtacaaccagatattagtaagaactgtaccctcatggtcatgttcctttttatctttaattttctcttgcaactgatattcgaaaaaattttctgaaagctttttaccaccgttacaaaatgcatggaggaatacccctgcatagatcgctatatctgttgaagctgatatagatgtccatagtagcatcaaaccctgaaaatagagtgagggtctttagtagtattgtcaagttctgattgcaaggtacataggcataataaatggaatccaaaaaaaaaaaatgaatagtgtataatatgctatatagtaagattttacctcgatggaagctacagcgcaaaacgtgctcagagtgaaacaacccgtatattgttcggatattgcagatacaaaaataaaaaggatagatcatagagcatcttgcagatttgtaacaacagcagctaaccgctggctgttgttgcccgttgaatctgtgaggtaatccatcaatataaacaccaccgatatttctacaaatccgtagcttgcaaccaaacctgaaaatatattggggagaaagaaataagttaaactctagctagttcccgtaaataacaaaatcagacaattagttgtgatactcaatgattaccgccaatgaaaggcagggtctttgagaagaccaattgattacggggtgaatctattgtggaatggaaaagtttcttgaaattcttcttaagagaaagtgagatgttcatttctgaactgttttcttcacaaagttagatgtgggaataaagcaatcatattataatagcttgacactaataacataccgatgtaacagaatgatacattttacatgcaatgggttagagatactgagtgaggccaagaaagaaaagaagacaagtcaacacgtgtgttaaaagcaaagatgtcaattcaaatattaaatgttgcactgtagaatagaaaaaataaatttatggcgagagagcttgtggagaaaataatttctataaaaaaatttattcaacttctttctctttttctttttctctcctctcattttgtcaaacattacaatgatctatttatagactataatacatacgacattctcgaaattgtcgattaacgacctcaaaatcttctctacaactcgcgcatcagttaatgcttctccgtttcggttgagttggttcaccacggtttgaacacgtgtgatgtagtcggagaccccttccgactccttcatctccatgccttccaactcaacacgaagtgttttaaggcgaacttgtttaaccagattggctcctttatagacatttgccaaaatgtcccacccttcttttgaagttgtcgcactcgcagtcttcttaaagcccgactcgtcaacagctcgaaacaacatgtacaaagctgccttatctttcaatcacgtctctttcaaagccttgtgttgagccaccgtatatctcgtggtaggtgtcggttcttcgaaaccttcttggatcacctcccaaccatcttgagacccgaggagagctttcatttggatgctccaattttcgtagtttgccttcgttagtcgaggcaacgacacattgttgatcatactcgtcattggctctaataccaatttgtagaatagaaaaataaatttatgtcaagagagcttgtggagaaaacaatttctataaaaaaaatttattcaatttctttctctttttcttctctttttctttttctcttctctctcattttgtcaaacattacaatgatctatttatatactataatatgcccttcaacaatttaaaaaggcttaaatcctattaatagccataacccaccatcaaaatccattatagtcattcatagccataaactacaatcaaaactcattatagtcattcatatccataaactaccattattgtggactcttgacctttcattctcctaaaacaaaattgctaattaaacccattatacttaatattttaagtttattcaacaaaactccttcgtaaacttaaaagcttctaccatccttcatgccaatcaatttcttgcagttgtcgagaagtaccgttagtagcggtttcttgaagatattcgcgacttaatcctgacttgccacgtgcactaattccacacttccttccttcacatgatctcagatgaagtgaaagcaaatatcagtgtgtttgcttctctcatgattcactgggttctttgccaactcaattgctgatttattgtcaacttgtatcacagtcgcacctagttgttgttgctccaacttgcccaatagatttctgagccatattgcatgacatacacaccaagacgctgccacatatttagcttcacatgttgagagtgtcacgatcgattgcttctttgaaagtcaagtaaatatcgtgttacctataaagaatacatatcccgatgtacttttccgatcatctaagtctctgcaccaatcgttgttggagtacccaatcaacttgtaatcttctgcattcgaatagaataacccaagtgacactattccttggatatactgtaggatttgctttaatgccttccaatgaaaataaatcgactcctccatgactcgactaacaatgccaacacttaacaaaagatccctccttgtgcatgtgagatagcgaaggcttcccaccaaactctggtatttgcttgcttcgactctttctcctccatcgaattgagagttttgcacccagttccattggtgttgatactgggttgcaacatgccatcttgtacttcttcaaaatctcctttgcatgtgcatcatgtgacacaaaaatactcgtctcttcttgtcttacctctagaccaaggaaaaacttcatcaaacccaaatctgtcatctcgaattcccgtgccattgtgctcttaaactcttgtatcatctcaccattgttccccatataaatgaggccatcaacataaagagcaacaaataatatattaccttcatttttcttcacataaagggcatgttcataaggacattgttcaaacccattctccttgaagtatgtatcgatacgagtattccatgcccacggtgcttgcttcaacccgtaaagcgccttctttaattttaacaccttattctcttctccacttttcatgtacccgggtgattgtttgatgtagacttcctcttcgagcacacaatcaagaatgccaatttgacatccatttgaaatatcgaccatttgaattgagctacttgtgaaatgagcaatcggtttgtctctattcttgcaacgggagcaaacacctcgtcatagtcgattccctcattttgcttgtatccctttgcaacaagtcggaccttgtaccgttctatcttgccttgagcattcatctttctcttgaacacccacttcacaccaatgggttgacttccttttgacaactccgctaactcccatgtgttgttgcggtcaattgctttaatctcctcgtccatggtagtttgccacttcttgtcttgcaccgcctcttcaaaacttatattctcgaaaactgccaaaagacatacaatatggttgcttgcacccatgtctttgttggtgttgacttccttgtgtgccatcaaaagaaaatcttctttcgcctcctcgtcttccatgattaggttggttttctcttcatctttttcctcgacttgacattctttcgcaaaatatcccaccttgccacaattgtaacacttatcagagtagcaatccttcgcatagtgaccatatttgccacactggtagcactcaatattggaataatttgatcgatcacctctcccacgactgcgtcctcttccacaccaattttgttggtttgattgctccctctcctcataatacccttcttgacagcgccctctactacaacgatcatctcttcgacctccatagccacgccctttacctcgaaagttttgagaatagagtaccttttcgtctttgattgatgccttggcttgaagtgcttgctagagtgtctactccttcttcttcttacattgttcgtgtgcctctagagaaccgaaaagctcatcgaccgtgagcttttttaggtcatttggctcttctatagcacatacgacattctcgaaattgttggttaatgacctcaaaatcttctctacaactcgcgcatcagttaatgcttctccatttcggttgagttggttcaccacggtttgaacacgcgtgatgtagtcggagaccccttccgaccccttcatcttcatgccttccaactcaccacgaagtgttttaaagcggacttgtttaacccgatcggctcctttatagacattcgccaaaatgtcccacccttcttttgaagttgccgcactcacaatcttctcaaagcccgactcgtcaatagctcgaaacaatatgtacaaagctgccttatctttcaatcacatctctttcaaagccttgtgttgagtcaccgtatatcccgtggtagttgttggttcttcgaaaccttcttagatcacctcacaaccatcttgagacccgagaaaagttttcatttggatgctccaattttcgtagttcgccttcgttagtcgaggcaactacacattgttgatcatactcgtcattggctttgataccaatttgtagaatagaaaaataaatttatgctgggagagcttgtggagaaaacaatttctataaaaaactttattcaatttctttcaatttttcttctctttttctttttctcttctctctcattttgtcaaacattacaatgatctatttatagactataatatgccctttaacaatttaaaaaggcttaaatcctattaatagccataacccaccatcaaaatccattatagtcattcatagccataaactacaatcaaaattcattatagtcattcatatccataaactaccattattgttgactcttgacctttcattctcctaaaataaaattgctaattaaacccattatacataatattttaagtttattcaatatgcaccacaaatcatcggttttacaccatagagcgaccaccactgtcagttcataaataagaaagatattactgattttatgtatggtatatgaagggtatacaaagttttttaattgagttggttgtatggttttagaaggggcagggaatatattgtcttatgatagaaataattgcgtaaatagtttctcattttgcaaggaatggataacttttgtaccttatattctctctctttataaatattttttgtagataaaaaaagttattattcgtcactttcttcaacgattagtggcaatgaaaggtaatgagaccaaaatagaatatggaatgatgttattgttaagaaattcttcatagatgtaatagtaagcaaagaaaagcagacgaatacaagttcatggtgatttccaatattctttatgggtcaacatggaaataatacatcgtatgaaacaggcaactaaggaactctgcacatcattaatagccaatagaaaaaattatatatctccgctccgttttgggtgaattggaatggaatcgaaaaaagaaaaacataggaggaaaaaaatgtagcgaagaaaattgataggttgtgtgatgaaaaaacacgagaaagattgaccaaataaggccatgtaaactaaaaatgaaagtaaatatatgttaagtattttcctaaccaataacatcaaggatcaaggtgtgttgttcgccatatatatgtgtgtaaagttgaatgattattcaaataattttatattatcattaattagtaaaacaattattataaaagtcagtaaatttaacatttatagatgattgtaattggatgatactattaaattattttatattgtcaattcacattagttctggaatgcatactacaatcgttcttgaatcaatattgttcaacatgatgttaagtattttactaaccaatatcatcaaggtgtgttgttggccatatatatatatatatatgtgtgtcttttaagtttaatggttatgtattaataatgtaaaatagttttatattattattagtatgactttaaaaggaattatcataaaagttaataaatttaaaatacatggatgattataattggatggcaatgttaaattattttataaaaactgtcatgaaatcatgagtttaacaacaattattgtataaattgtagtgaaagagtgagttcaatgatagttttttaaaaatcattgtaattgtgaatctttttcaattgacccgtgcttatcttcttcacttaagtacttatcctactttgaaccctagtggctctcgttttcatgccctggttgtcgctcccctggaatgcactcaccgtctttgtcatcgtcgtgtggtgtctccatcactgtcaaacaaaggaagggttagagtgtgacctgagatcaaaatgttgtagaggcttctctcttctcacctccctaaccgttgccgccactccccaaattcgtcgctctctctcactcctcctgttacttctaaacctaatccagtctctctcctttttttctcattcactatttcctaaatccaccagatgaactcatcttatttcttcttacagaggatgctactacgatcaaaaagaaggttgaggacattaggcgatggaatagtcaagtgtttattgcaaggtacttaggcatagtaaatgggagtgaagaaaataacagcaaattatatagggtgttgtttgttgaatattaaacttaaattagtttttgatccattgggcttaattgttaaatggcccaatatctagaaatatccaagaagtgtgtagtccaaattctagagtaatccactctagattgttccatggaaatatctagaatagtttgacctagaaaataccatggaaatatctaggctaggaaaattatggagaattctggagaataaattatagccactagttaagagttgtgttgacacaatcctagccattagttaaggaggtgcctctagtataaataagggtcatatccaccatcttgtactaagccaaaaagtcaaaagaaaaaagagtttgtagttataaaagtgttctcttcttccaaatctttctaaaaactgttcttttctcaaatatcctccttccaacaaagtggtatcagagccttatggttccttttcaagttcccatgctcaccaaaagcaactatgataattggagcatcaagatgaaggcccttcttggatctcaagatgtgtgggaaatagtagagaaaggctacaatgagccacaagatggagctactttatcccaagcccaaagggatagcttgaaggattcaagaaagagagacaagaaagctctctatctcatctatcaaggattagatgaggatgcttttgagaagatttcagaggcaaccaccgcaaaggaagcatgggagaaactacaaacttcttacaagggtgctgagccagtcaagaaggtatgtctccaaactctaagaagtgagtttgaaactttgcacatgaaagataccgaaagtatatcagattatttttctagagtcttgacgatgactaatcaattaaaaagaaatggagaaaagatagatgatgtaaaaattatagagaagattttgtgatctttatattcaaaattcgatcatattgtcaccatcatagaagaaataaaagatttagaagctatgacaatagagcaactcttgggctctttacaagaatacgagggaaagcaaaagaagaagcaagtaggcatggcaacttgacccgcacccgtgggcattcgtccgaacccgccccaatgtcaacggggaaaaaccgagttgatcggtttcgggttcgggttcggtttttccccgcctgctgaattcttgggcgggggcgattttggtaatgctgataaccgccccgcccccgcccccgtccccgccatgctatatttaattatttacaaaaatacttttatatatgtggaataccttgggataaaggcttaattttattcaagaattaggagtataactaattttattttccagcaataaacatctaatgttgaaattttattgtaattacatacatttgagacttagcgcgatcaaattttatgttataattgttgtttaaaattatttttttaataataatttctaagtgttcgagggcggggcggggcggggcggggggcaattttttagccccaccggttttcgggggcgggggcgggggtggtataagtaaaaaccgcccccgacccgccccgttgccatgcctagaagcaaggagtaggtgaacaattactcaagacacaagtcaactccaaagaaaaggaagaagactttggtaacaaaagaggatgaggaggatatcgtggccgaggaagaggtcgaggacgtggaagagtaggcttctgcaacaactatgccaatgaagatcaaagagagagctcaacaagaagctgcggaagaggtagctcacaaccaaaacgtgacaagtctcaagtcaggtgctacaactatcaaaggtttggccattatgcttctgaatgtagagtccctacaaaaggaattgaggagaaggcaaactatgtggaggaaaagaatcatgaagatggcactctgttgatggtatgcaaggacaacgtactggaacaaacaatacatggtatttagactctagagcaagcaatcacatgtgcgggaagagagacatgttcgtggaacttgacacatcggtgaatggaaatgtctcgtttggagatgaatcaaaggtaccagtgaaaggcaaaggtaaaattcttatccgattaaaggatggtaggcacaaattcatttctaatgtttactatgtgcccaatatgaagaacaatattttgagtttgggacaactcttggagaaagggtacgatgttcacttgaataataatactctttctttaagagataataaaaataacttgatcactaaagttcttatgacaagaaatagaatgtttctgctaaatattcaactagacattgcaaagtgtctcaaaacttgctataagaatgcatcctagttgtggcatctacgatttggacacctcaactttggtggttttgagcttttatacaagaaggagatggtgagaggattgccttccatcagtcaacctgaccaactatgtgaaggatgcttacttgggaagcaatgtcgaaagatctttccaaaggagtcttcgtcaagagccaacaagccactcgagcttatacatacagacgtttgtggaccattaaagccaagctcactcggtaagatccattactttcttctcttcatagatgatttttcaaggaagacatgggtgtatttcctaaagcaaaaattggaggtgtttagagtcttcaagaagttcaaggcaagtgtggagaaagaaagtggatgcgagatcaaagccatgagatctgatagaggtggagagttcacttccaaagaattccaagaattttgtgatcataatgaaatccaaaggcctttaaccatccctagaagcccacaaaaaaatgaagtaattgatagaaagaatagaaccattctcaacatggcaaggagtatgctcaagagtaagaagatgccaaaggagttttgggctgaagtcgtggcaactgctatctaccttttaaatcgttcgccaacaagaagcgtgtggggaaagacaccacaagaagcatggagtggaagacaacctgggatctctcccatgaaagagtttggaagcatagcctacacacacatccatgatgagaagaggtcgaagcttgacgacaaaagtgagaagctcatcttcatcgggtatgattctaattctaaaggctataaactttacaatcgtaacaatggaaagaccatcattagtcgagatgtgaagttcaacgaagaagaaaaatggaattggggtctacatgatgaaaactacaacttacttcccaacatgatggaggacgaagaaatggaacaaccaaggatggagcaagaaagacaagagactattactcccccagcttcaccgaccacaagtcaacaagaagaaccattttcagctggaagctcaagcgaaaaagtaccacgcttcaggagcttgcaagaactttatgaggtaacggagaatcaagataatctcactttgttttatctctatgttgattatgagccagtgagttttcaagaagttgtccaaagcaaaaagtggagagatgcaatggatgaagaaatcaaggcgattgagaagaataaaatgtgggagttaacgtcacttccaaaagggcataaggcgattagtgtgaagtgggtctacaaagctaaaaagaatgccatgagagaagttgaaagatacaaagcgcgattggtggcaaaaggctatagtcaacgagcaggaatcgattatgacgaggtatttgctcctgttgctcgcttagaaactattagactaattatttctttggcagctcaaaacaagttgatcatacaccaaatggatgtaaagtcagcatttttgaatggagtacttgaagaagaagtgtacatcgaacaaccaaatgggtatgaagtcaaaggacaagaagataaggtattggagctgaagaaggtactctatgggctaaagcaagcaccaagagcttggaatagtcaaatagacaagtacttacaagagaacgatttcatcaaatgcccttatgagcatgcactttatgttaagcttaaagatggagatattttgatcgtgtgcttgtacgtggatgatctagtcttcacaggaaataatccaaggatgttcaaagatttcaagaaagtgatgaagaatgagtttgagatgactgacattggacagatgacatactatctcagcattgaaatcaagcagaaagaagaaggcattttcattactcaagaaggttatgcaagggagatactaaaaaaattcaagatggacgattgcaagcctatcaacaccccaatagaatgtggagttaagttgtccaagtatggtgaaggagaggatgttgatcctactttcttcaaaagcttagttggaagtttgcgctacttgacatgcactagatctgacatcatttttgctgttggattcgttagtcgctacatggagtctccaactaccacacacttaaaagctgcaaagagaatccttcgctacattaaaggtactatcgactttggcttgttttactcaccctctaatgaatataaatttgttggatttagtgatagcgattgggctggagacatggatgatagaaaaaacaccactggatttgtgttcttcatgggagatactgctttcacatggatgtcgaagaaacaatctattgttactttgtctacttgtgaagccgagtatgtcgcagtaacatcgtgtgtctgtcatgctatttggctcaggaatttgctgaaggagttgaatatgcaacaagaggagccaacaaatatttatgttgacaacaaatctgcaatagcattagcaaagaatccgatcttccatgacagaagcaagcacattgatacacgctatcattatataagggaatgcattgcaaaaaaggaggtgcataaaagtatgtgaagtctcaagaacaagttgcggatatcttcaccaagcaactcaagaatgaagaccatgtcaagatgagaagattgcttggagttacaaaatcaagtttaaggggggtgttgaatattaaacttaatttagtttttgatccattgggattaattattaaatggcccaatatctagaaatatccaagaagtgtgtagtccaaattctagagtaatccacgttagattgttccatggaaatatctagaatagtttaacctagaaactaccatgaaaatatctaggctaggaaaattatggagaattctagagaatgaattatagccactagttaaaagttgtgttgacacaatcctagccattagttaaggaggtaccactagtataaataggggtcacatctaccattttgtactaagccaaaagccaatagaaaaaagagttgtgtagttataaaagtgttcttttcctccaaatctttctaaaaacttttcttttctcaaatatcttcattccaacattattaatgttaaaaataataattaaaaaaataaaggattgtgtgttagtgttataagatgaagaggtgtaagttagtaagaattaaggggttttattcttgtgtaacaactaaaatttgaattgtaattgacaatatgtccttttagtctgttaactgaatatgtaatgtttataggttgttccactataaataaagtattaatttatatagtttgtgtgtcaaatgaaatataatctatttctagtatttctctattttcacctttgtgtttctcaaaatggaggaagatagctttgttagggttgctcttgtctcgtccaaaaataaagatgatcttcttctaagatcaaatagaaaggtcaaaagaaagcggatggtgagcatgctgctgatttaagagatggatgaagataaccttaatgtgtcatatcgtgaataattacttgatagtgttgtgccatattccaatattaatcgttgcgccaaaaatcatcgttttcacaccttagagcgaccactgctgtcagttgataaatcagaaagttattattgatcttatatactgtatatgaagggtatatgaggtatttgattgagtttgttgtatggtttttaagagcgattactttggtaacatattggttcaattatagtccaaccaaaaatactaaataatttaattaaaattagaggtgttaaattttcacattttctatataagtgtatagaataaaaaattgtacatgtacattattatttaacgattatataattgttaaacattacttaggtgaaaaaagcatttttaaaataatttttaatttcacaaggctttatataatacataaaatagcaaaagattaatttcaaattaccataataaaattacatcacaactatatataattaacccaccagatttgatgcaatttttttttaaaaaatatatgctgaaataaatatttcattatatccaaaatttaaatgaaatccaaataattttagcggttgattaaaaaaaagtataataaaatacaatcatattcatttccaaaccacttgcacctatggataccttgatatatactaatattgtatccaaatcaatattccttacattgatcttgtattaaccataagccatatatattcatagtcaataacaaagaaattaatatatatatatatatatatatatatataacatgtttacaaataacaaacaagtcatataaaatatagacaataagacctttaaatattttaaataataaacttagctcaatgttaattcttagtctttaattggacatagaaattaatttgtagttagtactctcaagatcaaatattgtcaattagttttgtcaaataaataatcttttttggactgactattattcatatgaaaaacattttataaaattgtcatatatttatttggtcaaattgcatcttccttatgatcaaatacaatttgcataaataatctcatactaacatgtatgtaattttaagcaaatcaattttcacaataggaattattttggaagtatattgtgttaatcaatttagttaaaaatttaccagacatgcatataaatagagatggtccatatttgctaaatttgcaccaatcatgccaacaataaatatgaaacattaatcacgtcaagtaaatattacatccataaatgatgttatcacgctatatcaaatatattataacatcaccgattcatgtatcaagaaagcacaagacacataattcatcaaaaaaattgtcatgtatgtaatattaagacgataaaatccaaggatttccaattgtacataatgctttatataaaagtatatgtctctaactttgtattgaacctaatcatttttatataagaaaaaactttaaagaattcttaacaaaaagctagattcatatattaacataattaaaaaacttgaatcctaacaatcaagaatgaagatatattttgatatcacttgttggaatatctttaatctttaatctttatatttattctttatgcataaactaaaattttgtaggtacatgtcattgaacaaatcacccaaggccttaagatctacaacatgtttaaatattaaggattagataaaatacttcgatctattttttgatttctgatcaaaacgttctccaacaactattaaattatgaacaaccgatgacccactcgttatccctcaatcaaagtctgtttatttgtcaataagacctttgtaactcttaagatacggagaacaaaatttatgtgtgataactcagtatattcagaatcataaacgtgttaattaaataaaattcttattatttctctaatgaatcaatattaacatatgttcatttaaactcatttcatcttttttaataatctaataggtacatttaatttaatcacatcaaataaaatcaataataataaataactaatataattatcttataatattaaatcacattaattattaaaatagaaaagtccatcatctaatcaacctggattgaaacctataagtcaagctgaacctatgcactagataaacctgaaaatcaacctgtaatgaaaatcgtacatatattctcttggctttcttcaattggttcttcgatcataatcgtttcttaaaaaaaaaaaaaacaaaaaaaagaaacaggggtaagttaactattagtatttcataataaaaaggaagttgataaataaataaagcatgagaaagacattcacgtgcagtcatcatatgacaataattatgaaatatgttttaaatacctaaaacattctatatataacaacaataaaattttatcccactaaatgatgtcagctacaagattaacaatatactacttatcccaaccgcgaaaattgtggaattaaggccactgtcagctacaagattaagaatattctatatatcccattaattaataatttaatacccctccatatgtctctagtaactagctagttagcttcttatacattaaacgcctattacttctcactattatttctttttctctctcaatgttgattaacatttgacgtgtctaacaaatatttcccttcttttaatacttttcgtgtagacctgatccaggtgcttaatcattgtttatgaaaatttacatgttgttttattctcaataacttaatggaaaatgttcataagtgtcttaagaactctaattaattatggaaaaagttctattaggatgaaaaaataacataatttctatttttttccattatgaacactcaacaaaatcccaaattaatactaatatataaaggaaaggaaagaaaagagcctttgttacctaatagttcctcctccagctgcaatgcttcattataatgttcctcacaagaatcatgtgagtctgatggatgaacatgttccaatgtttgctccaacgaaaatttttctggacactcttccttgtatgcatatctaatggaatagtacacaaaagcttgaaggaacacaacgttcaatattcccaacatcagatagtaactgtcgaaaccgctagcgtcagcggttcctttgaacacaaatggtataatgaggagtttgccactcccaatcaccaattcagaaaatgaatgctcaaaagaccacattgaattcgctacttggccatggaacaaactcgccaacccaccttcaacaagtgcctccgtcattcccaacagcgaaaactgtggaattaaggccactgcataaaagtttggacttaaggcctctgtcgaaaattgtggacttaaggccactgtcgaagattgtggacttaaggccactgtcgtgttcttgccagtaaccgacaaccaaagaacctccatacgccatgctacgaggctgcaaattaccgcacaaaccatgccaaaaccaattcttacaattgcggctgcatttgtttttggcttccaaccatctttagctttgaaatttctcaaaaagcatcgaaatgcaaaactgataataaagaagatgaatcgtgacataagtttcacgccctccttgatccaaacaagaataaggacattattaccattggtagtgataattggtgccatatcgcggcttgcttgtataacaaagaaaatgttccctgtggccacgagtaaactgtaagcagagaaggttaagccgatgtagatcataggaacaaggctcttcacttccctcacttcttttactgtgcaaagcttccccttcttttcgtgtgtctcgggactcacttcttgtgcattaactatagccgctttttccaaccacctgaataaccgcggaactcgtggccataaccttaatcctttaccatgtttatacaaatcatggttctgcttattatgcttatcatcatccttccagtaataacaattcggtgaggttggatactttgaatctcgtttcccaaaagctgccttgcatactctaaagatcatgcgtagattgctttcagcactcaattcttcgcgcctataccactcacaaccaaagaggaaaaacatgtaagtccctcccatgagaattgccccaaatctaaacctgtgatcatacgattcatcatgaactttaaaggcaatataagcggttatgatatatccaacaatcgatggagcgtacaaccagatattagtaagaactgtaccctgatggtcatgttcctttttctctttaattttcgcttgcaactgatattcgaaaaactcttctgaaagcttgtgaccacaattcccaaatgcaaggaggaataaccctgcatagaccgctacatctgttgaagctgatatagatgtccatagtagcattaagccctgaaaatagagtgagggaccttagtagtattgtcaagtttgactttttttaccaactcggataaaaaaaattttaattagcatttgagggtaacatttcaaaaaattatgaaatgaggataagtcataataagaagtacgacttttattttattttattttttaataaaatcgtaggtgtgtttaagacttctgacttgttttacttttttgtatttttttttccttttttttataattaaatttgaaatctgtatctagcatgattaaagttgtgtgcaataacactaacctaaaatttatcccaaaaaaaaaaaattgaaacttgctaattgcacctttctttttattaaatatacctcaatttttttttaaaatcttaaatttcaaatggtaatatttttaaaacataccctcaaatggaaattaatttttgtttaccccctttcttaattaacataatttttttgagctgcaactacgtcatatatagaaaattaattaaataaactaagtttaatttatttatttaaaaatgcaaagtaatttaattttttaatttcatttaatatttttatgtatttttatatcattttatttaatattttaataatttatgttataaataatttttgttcatttatttatttaattatttttttatatatgacgtagtggcagctcaaaaattttatgttaattaagaacgggggtaaacaaaatttaactaccacttgggggtatgttttaaaaatattaccatttgaattttaagatttaaaagaaaaaataagatataattaacaagttttaattttttaaagaaactgataataaaataggtgtatttagcaagttttaaggtacacaaatcatgtccttgctcatgaaaagtctgctaggtgcagatttcaaatttaattataaaaaagaaaaaaaaaagtcataaatatatttacaaattacaattttaaacatatcatgtcacttattacgatttaccttcatttagtagttttttaaatattaccttattaaaatttttttactccgagttgatcaaaaagccgtcaagttctgattgcaaggtacataggcataataaatggaatccaaaagataataatagtgtataatatactatataataagattttacctcgatggaagctacagcgcaaaatgtgatcatagtgaaacaacccgtatattcttcggatattgcagatacaaaactaaaaaggatagatgatacaacatcttgcatattcgtaacaacagcagctaaccgctggctgttgccccttgattctgtgaggtaatccatcaatataaacaacaccgatatttctacaaatttgtagcttgcaaccaaacctgaaaatatataggggacaaagaattaagttaaactctagctagttcccgtaaataacacaatcagacaattagttgtgttactcaatgattaccgccaataaaaggtagggtctttgagaagatcaatagattacgggctgaatctattgtggaatggaaaattttcttgaaattcttaagcgaaagtgagaagttcatttctgaactgttttctgggaccagagcaatcatattataatagcttgacactaataacataccgtggtaacagaattatacattttccatgcaatgggttagatatactgagcgaggcgcaagaaagtgtagaagtcaagtcaacacgcgttgttcaaagcgaagaagacaattcaacacgcaagaagaaaaatgaaaaattggcatgaaaagaggagaggggagaaaaaggaaaaaagaaaatagaaaaaagtaacatgtagtaaaaaagaaaagagaaagaacgtctaaaaaaatgactttgtcggtgtacacattgacttagatttatatgaaattgatggggtaaatatgggggaaatttacattaatatattactatagacgatacttacgaagacggttttaaatctcatacgacgacggttctagaaccgtcgttgttgcgagtgtcattgtaagttggaactttcgacgatggttgtcaaaaccgtctttgtatataaggatgacaaacgggccggcccccaaaaaaacggggggccgacccggcctgcaaaaaatgtggggcgggctagcccggcccgcttttacaaagtggactacaaatgctagcccgccccgctttaatgcgggccagcccgcatcaaaaataaaataaaaaataaaaaagtcaatttaaaaaataaaatacaaaaaattataaaaaaatacaaatatgataattaaaaaaacacaaagttaaataaaaataaataatttaaaattaatgctaaataaatgatgtcatgtgataattcacaaaattacaccatttgcaaatgaaatttacggttataaactgtccaaaagtgtaatatgctagtaatgaaagactatttgaaagtatcattatcataatcattttaatattaaaacttagaagttaattatgagagtgcaaaagagtataaattcaaagaatatatctatttcaaaatgtgttaaatatatttatttaattttaatatttcatatttaaataatataggcccaacgggctggcccgccccgccccgcgtttggcccgcaattttgcggggcgggccagcccggcccgcttttgatttgcaggttgatattatcaacccagcccgcgtttttttgcgggctaagcgggccggcccgacgagccaagcccgttttgccatccctatttgtatacataactttttttttttaattttttttttgtaaaagaaacaaagacggttgttcccaaaaccgtctttgtatgtgcacatacatagacgcttttgggaacaaccatctttgtttctttattttcttaattttttttggcaaatgaagataagaagacggtttctaccaaaaccgtctttgtaggtgatcattcaaagacgattttttggagaaccgtctttgtttccgtactttttaatttttttattaaaaaactaagttaagaagacggttattccgaaaaccgtctttgtttgtccacttacgaagacagttttgcaataaccgtctttgtttctttattttcttaatttctttttgcaaacgaagataagaagacggtttctaccaaaaccgtctttgtaggtgactatacaaagacaatttttttgtatgtgcacttacgaagacggtctttggaagaaccgtctttgtttctctatttttataattactttttttttgtaaacgcatctcctttctttttttttcgaaattggtttctagatatactaccaaatgaattttaaaaatacaccacattgaagggattttattctataaaataaataaaaaatcaaattgttagtacactaaaatttgaaattcaagttaacactgtaaaattaatttaacacaaaattaaataaaataccatgcaacattatattaaatgtaaatgaatgtatataacataattaaaacaaacatcctactttatagcatgaaacataatctaaaatttggttgaaagttgtttttcttccccaatctccaatgaccaagaagctaagtgacccatcttgtttaggtgcttgttcaaaccgctcaaacaatgcaaaggaaacaaccaaacacaaggtaagatgtaaggacccttactgtggcgcgggtggcgctagatcccgcgctgatagcgccgggatccttcagcagaaaaccctgtagagggtgtggcgcggttagcgccagggttggcgctgatagcgccagacccattgactttggcgctgatggcaccagaggttcggccagctcacgttgatggcgtgaagatggcgctagtggcgtggataagtcgagaggttggcgcgggtagcgccgagggtcgcgcggatcccgccagtagtgccctggaaagcctaaatcctatggttctccacgcggatagcgccaggagcggcactgatggcgccacagtgtttgcagctggcgcggatggcgttttggaggagaagaaaatcattttcttcttcctcagagctccaacagccatgggagagcttcccaagctcccatgaccttgcctgatgaccctaaacgctttctgaaccctttaatcctcctagaaacctagtgagagcgagaatccttcctctatttcccttaaaaccccagagaaactcttcctctgagagaggctgaagagaactcgagattgggcgaggattagctgtttctacggacgctaaggcaagggagagcagcctagaggtcttcctcggcagttttgaggtaagaaactcgagtttctctaattgattttggctttggggtttcctgtgaatagtgacccatctgtgatagagttagaattagctctgggtccagttgagagatgtgtttagaatcttgtgaggaggaaggattagctttcagtttgtgatttggtgaacgttggttttggctctaggatatgcatgtgtgacttggactgagtcacttgatttgagacatgcaagagccaaactgatgggcttgtagtccctatgtggccatggggacggtgtgttgtgagatagaccgtccaagccctatggaaaccctgaggttttgggttgtctgaactctaagctccttgtgaatggctagctgtgagtctagggtgactctgaggccatggttgagctgagatagaccactgagggtctatggacaggcctgtgatagagaagcctgatgaaccttaggtagatgacctgggttgatagaaaggactgaggttcctttctctgaggcagttgaagactgattgatgagctggttatgtttatctgcttgaatggtctgtgatatgtggttggttgccttgatagggcttgacacaaggtgtcagaggagcagaccattgtgcaagaagttggtgttgcaggcacagctatcaggtaagctcatcgctctgggaattagtccctttctctcgtttaccacccaagtgggtgattgatgcatgccatgcttgttttgtatttgtttatgggcatgttgtggaatgaaaggcctaagttgcctatcttgatgcttatgtgtgttaaagcctgaaaggctagatgaacggtacttggagtgatactcagaccgttccagaaatgtgaatgtatgatgaaccctaggatagacactgagatagtgtgagggtgatgatgcacctgagattgcaggtgatggaatctataggatactggactagtattgggctagttgaggttccctagccagaggaagagtttgaggcctccctggaatagctgagattccttgggaggtgccactgctctccgccttaagtcctaaggttggattgccctgtaaggatgttcctccttaggcagagatattgataagcttggagggttttcccaggctagtgctgtgaagtcctgagagatgagtgccccgggttgggatgatcactctcaggcagtggactggaagtcccgagggattgagtgcctccggtgtgagatgatctctctcaggcacgtgttgtggaaagtcctggaggtgattgcccattcatggatgttcttgcccaggcatgtgttatgaaagtcctggtgaggccaggcaaatgattatgaagtcctggagggttattcccaggccagtgtttgtgaaagtcctagagggctattcccaggccagtgtttgtgaagtcctgagttgaggagctcctcaggcaaagtggtgaagtcctgaatggtggattcaggcaatgtttgtgtgataaagaggcggtgcctctctgatatgttaagtgtctagtgagagacactatgataggtatctctgtaagactagtctgagatggcttgagagccagtatgaggtgggagacttctgatgctgaaagcatccgttgattacccagacagctgggattgtgtgaaagctaggctaaggtcctaggctttatgttgtgagctgggatgatgtccttagctctgttttctgtttgtgtgtgtgattggtggtgaaccagggtaaggaaagatctcccagaaccctgagcttactgagacgtttgtctcaccctgtgtggggtttgtggttttcaggtacttctagaggagagaagttaccacagggcaggaggccctagctgagagtgctggagtggttaggggctgcagatgaagattagaagagcttttattttgatctctatcctgttttctgtataagtatagggtgtgagtgtacacccgttgtctgtacatatttaattgtataaccactgatgtggtagaacttatgagttgtatgtatatgtacagattatgtgatgtatctgagtttatgtttcctcctgatatctctatttagttttctgaattttgtatctgcctatatttgtatgtttgagttaactggatctcaggggcttggtattgatgtttgatgtgtgtttttatattccatgcataatgtaattaagaaaatcgattctatcgcttccgcactgcgttcagataacgttgatagcgcgcttatgatattattaatgataacacgtccggggtgttacataagacgaatgggaaagtgttactacttcgtagaccaagaaaaaaggtttgtattaaaataatcatgattataataaataattattttcacaccagcccagaacaaaaaggaaaaatagaatatatcatatatcataatatatcatatatcattatagtttcttttggatgagtagtaaaaataataagagaaatattctctattgttataaaactttagtgtgtcaactgttggcaccaagtttctcacaacaaaactaataagtgtttggtagtaactagacattcatactagtatcaaagtgtaatcgagcaatgagcaatctattggtctctaaagagatatgagctaaaactaaatataccttataaattcttctgatttctgcacagctttctgagcagctttaacagcttgattattcatacaaagattagaacagaatcgcctctaaaatttgagatcaaaatattgtcggtgacattaatgaaatataatcaaacttcagacaaattggcttcacaaatatgcagaacaaaaataacaagatatgcttgaagtcaataaagaaaactcaccataaagtcccctgcatatatactttaaagtatccatttgaagctactgcaacgaacaaaaacgttagtgtctctattcaaaatcaagtgtatggcattttgggtttgggtagccatataattaccacaatactaattggtttaattatttttttatataaatatataatctacttttaacttttggttccaacgcacttttaattatttttttgcattatcaatagataattattgacctttgctttattacaatcttcattgttttgtctcagataatcctacttgcatgcaaaacaaattaattacacagtgaatgtctccatctagaaattcaaatgacaagagaatatcatggatgctccttcaattgctaaaaaatcttatatgattgtagtttaactatgtaattgcatttgttaatgaaactaaaaattatactagcagattgaaatccttacattagtagtaaaatttaaactcacggttccttctaatatgtaaatcatgatgtctcaataaaagtccatgaagtatcttgaagagtggatgtagaaaggcgacatttagttagttccagaacgttgatagtttaacccaaaatctctagtttcaaccaaaaaaatataagttccgatgacttataggttcagatgtgtggcttaggctacttcatacaaccgatctttatcatgttaaaaaatacttttcttgaatgttctaatcccaaatgctattagctgatcagtacacatgttaaacacctaaactaatgtacaccaatgagtagttacatgaacagaaatgtaaaattgagataagatctaatataaaattgaaatttgggcactaaccgacaacaataaaagagaatagggagaaagaaaacctgtgtagagcttaaaacatgttggcaggctcctttgcttaatgacccaccaattagaataggagtttcacactgtatagtaaagattagtattaaatataaatatagattattaggcaaaactccaattttgatttgaaaacagaaccggtgacaaaaaaacgagaaaaaacaaggcagcaatccaattggataatcctaatcatttaaggccactcaccataacatcttgtttaaccaagggataatcagaagcactaagattaataaaccaatcccattggcaggtcctgagaagcattgccatagcatggagagtggtagcaagcatagttggtcctctatatgtgaccaaattaggcttccccacaacccaagcattccctagttggccaaaaacaggatcgctagccacaaattctaccactgctctatgctcagcctgtagagcaccacaaaaacaggatcacaattgtttgatcctcgggctcagttgtggaggtttcaataagatgcccttgaatactcttattaaaaaaaactaaagtaaataatacgtgaagaaaggttggtaatataatcattgaacgactaaaaaattcaggacaaggttatttgacagatacaatatgcttaaacatactttggtggcaaggcaatagaatagaaaatgcataaaaaaccaaacaaccttgtcccattcaatcgtatatgcctatgccatgatgttatcatatttctaaagagtcaactgttcaagaatcatgagaaaatagcagcatggaacatggttacccaattagaatttgtgtgcctgagtgaagttcctcttcatcagatttagttctactagacattcctggatggctgaggatgtacagctatagtttctggatggttttctaacctcaaacaaacacatgaacttaggttttctagaaacatgattcaaaattgatgagatgaacaataagtgatcttatgctatacaaaaaaggtagagtttctatacaaagaactcaacacatcacttcgaaaaagaaaaaaaggaaattgacgacagtaacaggagaacttatgaaaaagggtagaaccaaaagatttaatgttgtaaccctcattattactacaggtttaatctatcatttccttccctcccttcctccacccttatttttctctcccttgaacatctacacataatatatgaaaaattataaatgcctactattttaacgtgatacctcaaaatgcaaacagaggcacatgttgacttacctcaaaatcaacaaatgcaataggcattcctcctctggaatgcattttgaccatattgaatccagtatatctgaaaagatggattaaagacattaagttatatgatcatatcaagtagatgaagaacattccaggatctatatataacacgaactagcatgtttagcattggttcaatctgaacaacagaggccctttgcagattcatttaaaagagagaagaaacgcacgcagaaaaaggctgcttcaattcatcttcagtgcaatttggaccaagatttgcgataaagatcgtggaacacaatcctccagtactgcattttccatgttgctcctgcaaccattttgaaaggattgtagtacagaagaccttaatgggaaaaggaagcgacaccttttcaaactacacagaatttcatctacttgttgaaacactgaaggaaatgacatgaattctatgtgttgcatttaaagcaaaagaaaatattggataatttgtacaaatgcaataagctgaagagttccaacttatttctgattttcacttgaacttaccacagatacagcattgtcagaaccaacagtcgtttcatcactgcatacaagcagagaatattatagacttagtgaaccactataatattcaaagtattgttacaactttatcatttttttgtgtgtgaacaatttgcaaaattttgacgtttgagctaaacagttagtaaatttattgtattctcaaccttgtcatgatgcctaaatcaccctagttgttgccactgtctgatggttcatcagggtcacagtcacctaaatgtggaagatgtgcagtgagacacgaaaacaagagggccaagaatatgtgcggtgagacacaaaaacaagagcttttaagctgatacttgcatacaaaggttgagtctttcttaaagatgccctgcctttccactgaggttgccctttggaatgtttccctgcaaactgttgccctgcatgttcttgtaaataaaaaagacaggaccatagattaattagctggaacttaaaagcttataaaattagacaagtaaacaaaatgtgttccatacaagcctaaataaaagaagaaaaacttcacagattgattaaagtgatcatagcacaaaagaacaagcaaattaagttgcagctatcttgatatacagccataaagcacatgcctctttaggtgttttgactgtgtgctattagcaggaacttttccactaggcgcttgacaagtatgataggcaatttaagaaatgagatactatcggtgcaagaccatggtcctctgtccctctcaataagtcctgaatatcagaaacactatcttaggacaagagaggagccaaatcctgataaggaaactactctcttgacacttggagaagagaactaaatttcacatatacctgtcaagaattcaaaaagctaaatggattcgaataattatatcgatatattggatataatcgatagtgaattgaaacctttaactattttactcattgaattgacttgagaaaaaaagacaaaataggcataagcatctgcaatggtaataaatttgcacttctgtcaaggtctccagctataaagcaaaaatgtaactagtaaatcaattaagtatgctttgtatccttcatgttctggtcagtggtcacaaggaaagaatccagtacttacttgtgggaatctagatagattcaaaagctgagaaaagacaagagcttagtcttcatttctgcaatacaatactcatataaaaggcatttttcttgacctctgaaacaatgatataatatagcttacaatggtgatttgatgaagcccaagtgatcaatcaatacaactgtagatggaaattttttgcacaactactcaatttcagaaatatatagaccaatcccctgaaaccatttgactcagaaattcttaatttcattaacttcatacatacaaaaagaaaggccccatactgtctagaagggtagcaataccatatgccattgatataaataatctaacaacctaaggttgtattattgggaggagaagaaactctacaagatagttcttttatatatacaagcaaataagaaagcaccttcatacataagaagcccattggtatattcagttctccggccctttggaaaattgccttcccaactttatttatcatctgcaatgagatcatttcagatataacccagaaaaaaataatttgatttgataaacagctacagcaaaacaaacatttttggtcacttggtgatgtaggtttcacagatgaaattgaaggacttggggttacaaaacaccttatataaagcaacaaaagaccttgcttcagtttcacaccaaataattagtgacaatatgggagagtagacataacccttctcaatagttgagactaggcaaacataaatagtaaagaaaatagaaatccttattatcctagctctaataatttaaagacaaaataagaaggaagaggcatactttcaatgaaacatctagtctccaattttagtcccctatatgtgctattttctttttcttctatgatctgtgtatttggtcatatgaatgacatttcatacaaagacaacattttggaaagcaagctgttagacctcaaataaaggagatatatgtagcaaggactcatggcaggtttaggaagaaacaagagcaggacctttaagaggtactgaacctgaatatttgaagggtatatttctaaatggattaaaagatgtagtaagggcagaattaaaactacatccagttaagtctttgactgaattaatggagtttgcacagaagatagatgagaagaatcagctgatagaaaagggcaatgttgcaagtattagaggaaattcatcaaaagtctatagttcatcaagaactgtgacttggtgtaaagaccctcaccgtggcgcgggtggcgctagatcccgcgctaatagcgccgggatccatcagcagaaaaccctgttaagggtgtggcgcggatagcgccagagctggcgcggatggcgccagactctctggaatgtggcgccaggggctccagggtcgcgttggtggcgcgagtttctctggaggtccacgtctggagtgccagagttggcgctgggagagccattgggtgtggactgtggcacggatcgcgcggggattggcgcggaacgcgccagaggtgctctggaaagtttaaattctctggatttccacgcggacagcgccaggagcggcgctgatggcgccacaacgtttaaagggggtcgcgttttggaggagaagaaaaatgttttcttcttccttagagcttccagcagccatgggagagctccccaagctcccatgaccttgcctgatgaccctaaacgcttcctggaccctttaatcctcctagaaaccaagtgagagcgagaatacttcctccctttcaccaaaacctccatattctgaggaacctccagagtggtggatgaaagcttgagtttggcgaggaacggcggtggttcagcggccccagggcttgggagagcagcctagaggccttcctcatcagttctaaggtaagaaactcgagtttctccgattgattttggatttgggggtttcctgtaaatagtgacccatatgtgatagggctagaattagctctgggtccagttgagagaagtgtttagtatgatgagaggaggaaggattagctttcagtttgtgatttggtgactgttggttttggctctaggtgaggcatgtgtgacttggactgagtcacttgatctgagacatgccagagcctttgtgatgggcttgaggtgcctgataggccatggagacggtgtctggtgaattagaccgttcaagccctgagaaaccctaagagtttgggttgagagagctttgatgctcaatgatgatggcttgtgttgagtctggaatgactctgaggccatggatggatctgagatagaccactgagggtctatggaaggcttgtagaggatgagcctgatgaaccctagagtagatgactcgggttgagggaaaggactgtgattccttccctgaggcagttgaggactgcttaatgagcttgtgcacgattgtatgcttgtatggtctgtgatatatgtttgtatgccttggtagggcttgacacagagggtgtcagaaaagcagaccatcagtggaggctagagctgtgaggcacgactagccaggtaagctcatcgttctgggattttcccttatcatggttttcatccaagtagggtgaggtttgcatgctatgtttgaattatatatgtatatgcatgcagctgaaaggaaggcctctgtggcctgttatttgatattttatgtgttggaagcctgaagggctataagaacggtactaggagtgaaactcagaccgttctagaaagatgaatatatgatgaatcctaggatagacactcagacagtgtgagggtaatgagacacctgatatggcaggtgtgaggccgtgggccttttgagagaatgcagatcatgagatggtctgtgatggaacctagatgatactggatgagtatcaggctagttgaggttccctagccagaggtagagtttgaggactccccgaaatagctgagattccttggggaggtgccactgctctccacctaagacctaaggacagatggaactgtgaggatgctcctccttaggcaaagatgttggaagtcctgagtgattttcctcaggccagtgtttgtgattgtattgtcctggacggctattcctaggcatgtgttatgaaagtcctggagggttttcccaggccagatgctagacagatatgttgtatctctaagagaggactttccgagggggaatagagcctagggcctcttagatgaaccatatctgtattctcaaagtcctgagttgagggatctcctcaggcaatgtttgtaaggtttagaattctgagttgagggatctcctcaggcaatgtttataggattaagaggcggtgcctcttttgagttgagaagtgtcaggggatgacacttatgataggtacctctgtgagacaggctatgagagccaagatgagatactgatgccatgatgatggctttgatctctgtgagatggttgtgagagccatgacgaggtggattacctctgatgctgagagcatcctgttatggacccagatggctgggaagtgtgtaagctaggatgatttcctcagctctatttatttgttttgtgtgtgcttggtggtgaaccatggttagggaggatttccagaaccctgagtttactgagacgtttgtctcaccctgtgtggggtttgtggttttcaggtgcttcttaagaagaggagcgacctcagggcaggaggccctggtgaaccagataggctggatgggaggttgcagtagaagaccagagcagagcttcaagagttggagccggtcttagtatctctgtgtagttgtagggtgtgtgtacatccttagtactgtacatatttgttgtatgacccagctgtggtcttgtttgagcatgtatatgtacagatggttatgttgtatgaaagtatgtttcctcctgactttttgtgtttggttttatgtatctgcctatatagttgtttatgttttatctggatcagcaggggcttgttttatgtactttgttatgtggtttcatattccatgcataatgtaatcaagataaacgattctatcgcttccgcatcgcgcgtagttaacgttgttagcgtgttatggatatcattgatgataacataccggagacgtccggggtgttacacttgggagtcaggcatcaaatcaaatcaggtcaaaaataaggaagcagcttctagtagtgactctaatagtgtgaagcctactggaacatataggggcagaccttttaggaggttatcggatgctgagtttcaagaaaaagctgaaaaagggttatgttataggtgtgatggaaaatttggacttggccatatttgtccaaataagcaattacaagtgatgattttgggtgaagaacaaggtgaagaggaggaaaaggaagatgagtttggggaagaggataagcagtttcaaaatatccaactatcattatatagtatagctggattaactacaaaaaaatctattagattgtgggggatgattgaaggaacaagagtcctgaccttagtagattgtggagcttcccataatttcattgcaaggacagcagtgagattattgcaattggaagtgacttctacaaaaccttatacagtggaagtgggagatggaaggagaattcgatgtgaaggagtgtgtagaagggttaaattatagatacaagatctgcagatcatgcaagattttttttgtatttgatatgagaggggtggatgtggtgctatagttttagcagtacaaaagtggagacactacttgatgggcaggaaattcactattgtgacggatcataaaagtttgaaattcttgatagaacaaagattaatgggagaggatcaatttaagtggacttcaaagttaatgggctttgattttgatattgtgtataaatagggttgtgaaaataaggcagctgatgctttgtccaggagaatgacctttacaacaatatctatgattcaatatgatgaggaggaggagtgggaaagggagatgttagctgattcaaaactgaaaataattatgcaagatttattggtgaataaggctgctcatccaagctatgctttgcagaataagaaattgtggtataatggcaagttagtgctatcaaaaaaatgtcctaaagtgcaggtgttgatgtaggagtatcatagttccttggtggggggtcacgtaggttttttcagaactttcaaaagaatagcagccctggtttattgggaagggatgagacaagatattaggagatttatttatgaatgtgatgtttgtcagcaaaacaaaaagtaaaagatttatttggtctttaaaccacctaacaaaagttcttgtatgtatgtaggtaggggagcataatgtcgaggtgtaggactggctaggtttgacatttcgaaacaggaaaagcagcccaagatgttttattgcttctaattactgagatatgtggggcaccaacacatagagacaattgatcattcacattaaagtgcacactttcccctttactctgttgaaacagaggtactacgcccctttcttgtgtaactacgaggggttttggtgcatcaatgttaaaaaaattgagagtcagttacacacctatccatgtatatataatatgtatattgaattttgtccattattgataacttaagttaatttatgatgacacttaatatcttatgttgctcaataagtcacttgataacttagttgataagaggggttatgagctgtcagtttcagttgtaactataattcaatataattggagactaaatagccatgcaaaagtttaccagtttgtttaattacttgtcagcagaaccaaaacatcgatgtgcatgatataaacatagtttcatgcatctaaataacaaacatcaaggtggatgtctaattgaagtaaagaagattttcaattccaaagccaaagagatcaagttcagcaaaagaacctaatgcatgcaatatgagatgacatatttatacaagtactctttcataacaaagcatgaaataaatcaacttattgtggttttagttatcatttatgcaaataaaatggcagaaaattaatgaggtgagaacatgagtagtgagtagtgacaacacaaaccttgattgcaaggtttcagagggtcttcactctatagtttgtgacttgtgagtcctatgcagaagattcaggttggtatttgtagacatggggaaatcaactacaaggaaataaaaacataacatgttaaaagaatttggataataacttaaagataaaatatgttcatgcttttagcttatgttcatgcttttctctttcaaaaactttgttatgtttaattcattcatcacttgtaatgcaggagtcaaggtgttttttaagttagaccggccagtccctaaaaatgttaaaggattgaagggatttttaggattgagtgggtattatagataattttaagaaaatttgaagaaggaccagtttaattgggatgaatctgcccaacaggcatttgataagcttccattgtttgagtcgggtataaaactaatcttcaatctagcctaaatttaatcaaatgtattatgcggaaatcaaattcaaaacattatcccccttaaactcattgtgtgttgtcaactgaattacaacaattggatccatatatataatttttaatacaaatttttattacgagttatggaggagaaacatcaatttgattaaagaataatactgacttttataattattttcattacactttcaaaccccacaagcttagagagactgaaacaaggttgctaaattcataagacaagatttggggtacacactcactaccacgttagttactcacacagtatatacaactagctaggagcaagtatgtgataaagcaagccaaacacacttatcaatcaggtttattcctagagaaggagaaaaagagagatagggacagcccatgaaagataaaatgttgccaaaaggactcatacatgagaaaaagacggaaccctcttcttgtggcaacttatatatactttgacaagaaacctttgatctttcgttattgtctgaacttgtccatatagtattctttttgtccatagaattccaaagaaaatagaggtaattaaaagtcatatatcacttcccgattttcatacacaagaattctctctctctctctctctatatatatatgtatattatatatttatatggacacatgcacacacttcaatttttgatattcttcaactttgtgaagaatttagcttcttctactttgtgagaaactttatagttttagcttcagagaaggtgagttttttttgtgtaatttttatcatttctgagaatatatatgtatatagtatatacattatataaactatataaaaaatttcaaaataatagctatccagcaatatgctatctcgctatagtacttttggagtgggcggctatttgggatttaaaacagtgttgataactatgaaaataactaagacaatatatgaatcagcctagaagagctatctgatccgtcgaaatatgcatcaaagaaatacatgagatctttacgtaaacttctaactaatacaaaatttgtctaggttcattagcaaatttagaatatgttaaatacacctaacactctcactaaagcgatatttggagtacctaaaaaaatattgaagatctccaactacaagagagattaccaattctcaaaattttctacaaatctctagtactaaacatgactttctaaataaaacattctagaccaaagtccaaaaaatttcatgctatgatcattatgatggacttgtctaccaaacaagcttactaaccttcttcacaaaacagaacattgcaattcacataaatatatattaacaataaaagacatcccagggtaagtgactaccttttttttctacaagttgataggatttaagtctaataattttataaaatagaaacaagtgcaaagaaaattgtcttccataaaaaatcaccaaagaaataaaaccattttgaggtaataaataaggcaggtcaagtttgtaactttgaaactcaagttcaaagaccaaaatcaactaaacagcaaataacaacaataataattttgggacaaattgttataaacttcaaccacatgttctacacttattcggtgaaaagataatacaacttcctgaacttacttctcagactcagagatagaagaattgttgcaaccctgccacaaagaaattatgtttcaggatcaccaaagaagtaaatagttgctacaaaattacatcaagtgccatttttaagaatgagactgcgcgcgaaggccatacaaggatatgaaaaaaggctgcccaaatgaaaagcagaaatacaaaaatagaaaaatcgaaaattattgccaccactttaataacatgtgcaaacagcaaaagggactaaataaactatgcataaggcacaatagatgcataccatttggaggtcgacgcagaggcaaggggatcaacaaccagtcctttggcaaggagaacgacagtgaggctagggcacgggatatttggggttaccttcacggaactaagatgacgctaaggcacgggaatatttaggattctcttcacataatgactcaaggtagggcatgcacgagataattaggcctccttggtattttttgggttttaattttgcttcataaatcaaagacggttgaaggaaaaaccatttttgatttaagttccaaaaaatcacaaaaatgccaccggttataaattatagcattacgacgacggtttttaaaatatctgtctgtgtttataacttgataattacaacaatgccaccgcgtagccaactaagacggttttgatagaaccgtcgtcttatgtgcgccttaaaaaggtatatttctagtagtgataggtcatgagtaatcatataagtgaactagacaccccaccttaacccaaaaccttaaggctcatgtttatggattttctcctcacttatatagtgctcaacttttctatttttattcgatatgagattttacctcacacttatactccaacacatttaagatagtgaggacaaataatcaaacttatcctcaatctgtcctattattatatctactttaacaattcatctcgatttactctgaagttaagttgggtccaatcaaggttagatctgaatggataacatcacaacactctctctccataaccacccatacccattgccaataagtgattcaattaatttaccaaagcaccaaacagtatgcaagataattgcacaattctgagtggtatattccatccacctttgtttatgcatttaatgttatgctctaggggcatttttctagttggaattagacaatattttttcgtgcatttaatgttatgcctaagtgactaaatgatgctaacagcagcaatgagaggctaagattgttgttgattaaatatttggagaggcaatgagaggctaagacagacttttgtgggggaccccgttgccatcacgtgcccccgattctaagacaaatgatagttacccaataaaccaccatcttcttcaccctctcacatgaccttgttcctacttttgacagattatttgcatgaatttccatcttggtttacattttatgcatagcaatgctagctacatcaatcagactcttgtttaacagattttaactagacaacttccaagtcccttaatttggtttgtaaaacatgttgcaatttctagggctgggttgttgtgactaagataatttctcaacagttgattagaaaagaagagtttaattaattataaatgtcatcgcatgtcgattattcaaaagagaaatgtgacttattgtttccaattaagcaaataatcgactcgtctcggcctgtctattggcttttataatgacataaaaaatactttataatcccaagaatctattatacatatataaaaactaactgctagcaaaattacaaaatgagacatcctatattaatgacatttggcaaaaaagggggtaaaatggtaattggacataaattttctaattacaccctctttttaataagtgcactccaatatatccaaattaaaacttgctaattacacatatttttttataagtgcactccaatatttccaaattagaacttgctaattgcatcccctttttgttaaaaaaaatctatatttctttcatccctctcatacgttatctctttaatacatagacagaggtataaatgaataagattaagtaacattgaaaaacttccttataaatttcactctttagatattgtcttttattatccaatattagtatacataaaataattcttgaactaaaacatttagttgttgatgtgaaaaaataggttatagaagataaataataacatgtctcaaagattatccttacctcttcattcaaaaacaacaaaaaattgtttacactgaaatttaaaatggaattatctaatcacatggtgttaatgaaatttttggtcttaaagtagtatacttttctttgtattgcaaatttgcatatctcttttaattttcgatctaatcactttgttccccaatatacattttgcgatccccatttggcctaaggtaaatcaaaacaaaactgaataatggtgtccataataaattccacaaaatttttgccaattttacacttaaaaataaatttattttttcaaacaaaaaaaataatgtaaaaaaatcattaactaataaatcctaattgaaatgtattggtcaatgtaagaaattgctgattgcacccctttttaataaatgcacttcagtatttttaaattaaaacttgctaattgcaccctctttttgataagcaaattagtatttccttttaaatcttaaatactcattatataatctttttgatccctctcacacgttatctctttaacgcataggtaatggtattacatatgtacgtagggtatcgtactagccagttacaaaaatacaaaatcacaatattattttaattttccttcgagactctaaatcattagtggtataataattcctctcttatttacttaacaactgtctagaaaagtgtagtgatttcctttcattttatgttatgattttcattatctcctacttttggtccttcatatttctcaatattattggttctcatctcaattgacttggtctaattattgataggtttgcacatgtgtgacaaaagataaaaccttaagtggatccattgtttaaggcctgatttcaacagaggtgtattatcacaagaagaataaattattattgaactgtacttctttttgttagatttgatgaagaggttgaggaagatcatgaagaatcaagtcaaggtattcttaagttttgattttacatgcccactcaaattgatggcatatgtactttgtttaaaagcttggttcaagaaagatgaaatccctcattcctcacataagctaaataattcatgcatacatgagctcattaattcatgattaggtcacacacattccatgaatcatttgacatgacattaaagcattaaagttttcataaaaagtgtttttcactgttttaatcgattactggttgcatttaatcgattaattgcttggttacaaaactgcatataaagatatgaacactttaatcgattaccaaattcttgtaatcgattatattcagctgactttgttaagtcattctatgataatcgattacgtgacagattaatcgattatatgtccatctgcataatttttagaagaaagtttatttggtttaatcgattaccatattattataatcgattaaatgagcatttatacgtttttcacactccctgtgttaatcgattatttgtgtattaatcgattacttcagtgcttcaaaaaaatccagatcctctggaataatcaattacgacatgagttaatcgatgaaaaacgataagaatacttcaatacaaccaagagggggggtgaattggttgaaccttgaccaattaaaatattaaaatcagagttaccacagaatctttatcactttcaaaaaattatttcaaaaccaagaattaatattcaatcaaatttcttttacaagaagaatagaaaacagagtataattttctgtgcaatgaaattgattcacaaacaaagcaattaagagattaacagatgagaagaaagattagtccagattttatactggttcacctcaaaccctatgaggctacatccagttcttctactcaacactggagtagagttccactattgtaaaaatattcttacaagcaaatttacaagcctctcttcatcaaccctagatgaagttcagagatccaaaaccctattagatccttagagaccaaaacccacactgagaacactactcagttgtcttttagagaaacattatctcacacttgcaagaaacttaattacaatagactaatccttacaaatattcaaagaacagtttacaccatcaaagaataaggaaagctatcacctgataatccaagaatgaatgcacaatgaatgattctcaggttgaaagacagattacaattacttatgcagtcctttccttatgctttgaatgaataaagcttcaccttcttgaatcaaaaaccatatgagattttgtgaagctaagtatgtttagaactcagagaaactcactaatgaaagctcagaatgtttgtgaaagcccagaattcgaaaaatcaaaagttacaaacttcagagaagtgagttctatttataacaaatttttaactgaaaataatcaattaaacacgctcatgtaatcgattatttaccatttgtaattgattaaatcaagactgtaatcaattaaaatactcctaataatttctgggtttgggctataaacaatataatcgatatttccgtgaagtaatcgattaaactagtcagtcatattttcttaaatgatcttagtaatcgattaatacaatatgtaatcgattaagacaatgatctatgttttttctaagtctatatgcataggcttgtaatcgattaccaactctatgtaatcgattaagacagagagttccttttttcataaaaagccttagtaatcgattaaaccgatatgtaatcgattacaatgatcatgatttgttttctaaaggcacgaagaacaaaataatctattccagtatacgtgtaatcgattacttcagtaaaactttatttttccaaaaacttaaccttttaaatgccttaattatatactgcctttgattaaaccttttaatctaatgatcctaaatgaatgattaatgcatgatgtgcacaattggattatcagatcatatacttccttttacaattaatcaaattggtctttaatgttttccatggaactttgcctttgagcatgttgaaagcataaaattttttagcctttgattcttgttcattgatgcttagcttctcttgaatcaacaatcgattatttgttcttaagattttttccagatttcacatgaacactttgatcgattattttggaactttaattgattacatttgttaaaataatcgattacccttacgaaataatcaattacagtcagttaattctgttttttttataaatagatgcaactcattaagagatgagagacttttagttttacgaagtaagccttgtaaacactttctctggagatttcaaaagcaccaaggctcattagaaacattcattgataatggtttcaagaatcatgaagaatctcatgtgttgagtcatcttttcatgattagttttggttaaagcctcatttgtcaaaaaaaaagtcatcaagcaagatcatggcattcattctcagtctggtttgatcatttaaactcattcatttcactgaggatgcacaggtgatatctttcttgaatcaatttctttgttgttttgtttagaaattgtttggtttgttgtttgttgttgatataacaatttgtatctttaaagcattgctagataggtatctagtggctagaacagagaggggatctctggttcttagatcttttgagaagtctataggtttagattttgaattttacctacggtaggtaaaagatatctgtgtttgcttgtaaagatattcgttttgttatagtggaaactctaatcaaggttgattagaagtaaaactggatgtagcctccgtggttgagaggtgaaccagtataaatcttgtgtgtaattgtaattttctgttcatattcatattgttcttgaagtattatttttgttaacatcacaagattgggtgaagctcaagagtgggttgattgagataaaagtttgatttcttaattggttaagatatgatccttctttcaaagtctttcgttgtgtacaaaatttgttttaaattttaaaaactctaaggaaaaaccaattcaccccccctcttggttatttgcataagtgttcattctattttcaattggcatcaagagctggttcttgtaatttgctcaagatctcttcaaaattcagtacaatgaatactaatcaaataactttcaaagaggggcctcattgaatagacctcctttgtttgaaggggaacattttaacttttggaagagtaggatgcaaatctttatccaatcaaacgactcgagagcttggaactgtattgaaaaaggtacttacattccaaccaagattgtggataacaaaacaataccaaaagaatgggatgaaatgtcagaaattgaaaagataatggttcaatatgatgtcaaggctaaaaatatgataacttctgctttatcttccgatgaatttttcaggactgttaggtgcaaaagtgccaaagaaatgtgggaattactagaagtcacacatgaaggaactgaagatgtgaagagatcaaggaaacatactctcattcatgaatatgaaatgttcaaaatgagagatgatgagaacatctcacaacttcaaactagatttacccacattgtaaatcacttgcttggacttggtaaaatatttgatgcagaagagttgaatatcaaaattctcaagtgtctaacaagggattgcaacctaaagtcacagccattaaagaatctaaagatctatctcaaatgtcaaagcaatgtttggtaagcttctagaatatgagcttgaattatctcaactaaccaataatgaagatgcagataaaaagcacaaaagcatagcattaaaggctgcaccttcaaagatagaagaagatgatagttcaagtgaagaggaagatgatgaaaatgtcaacctcattgttagaaagttttccaaatttctaaggaaaaacaagggcagaaagcaaccattccaaaaggaaaaagaatgactaaaagaacaagaacaacaacacctcctcaatcacttgctttgaatgtgggaagcaaggacatataaaatcagactgaccctcattaaataagaagccacaagtagagatgaagtcaagaagagaagggaagcagaaaagggcttatattgcttgggaggataatgaatcaacaagttctgaatcctcatctgaaaaagagattgaagcccatctttgtcttacatccaccatcaatggagattgtgaatcatatagtacaaaatcagaggtaaattctgaatttgacaatgttgttgatgcatttcatgagatgcatttagaagctcaaagattggctaaagcaaacaacaaacttaagagtgatctaaggtggcatgtatccaaacttactgagttgcaagatgaactttgtaagttgaaggaagatcatgataagcttctctcaagttacaaagaagttggatgtacatgttcctcagccaactctaagcttgacgatttcaataatatgcaaaaagaatttgatgattataagctatgtgctgaaaaagaaaacatgtgtttacaaactgaaaatagttatttggttgatttgctaaaaaagtactacaaaggtaaatgcaacttagatgagttactaagtgtgcaaaaatctgttggtgatacttatggattgggatataaacatggagctagaacacaaaacaagcttgtgtttgtaccaccaaaacataagaatcaaagaaagcataatcaatcaaatctctatcaaagattcacacatgctaaatcatcaaagaatcttacttgcaattattgtatgcttaaaggtcacacatcatataaatgttatgctagaagattttatgttcctaatggtgaacgcatatgagttgagaaaagaaagaaagcaactaacccctttggatccaacttaaattggggaccctatctctccttctaaaatgatttgtgcagatgtgtcttagagcaaaatcttcaacttggtaccttgataatggatgctcaagacacatgactagagacatatccatgctaacagatgttatacttgaagaaaaaggatatgttacctatgaagacaacaataagggcaaaataattgggctaggaaacattggagacagcttgtctacaaagattaaggatgtgctgtatgttgaagggctggaacacaatttgctaggtattagtcaattgtgtgacaaaggatttaaggtcaccttcaacaatgagtggcaaagtggcacacattggtaagagaaagggtaatatctatgtcttgactattgaccatgcattcatacataaaactgattgcttgatgagtaaagtgaatgaaacatggttgtggcatagaagaacatctcacataaacatgcatcatcttaacaagctaattagaaaagacctaataattggtccacccaagctcaagtttgagaaggacaaaatttgagaagcatgtcaaagaggaaagcaaactaaaaactcatttcaaagtaagagtatgatttctacttctagacctcttgaattgctttacatggacttatttggaccttctagaaccatgagcttaggaggaaattattatggacttgttatagtagatgactactctagatacacatggacattattcttaatatctaaaagccaagcattcttagcttttagtaaacttgccaaagttattcaaaatgaaaagagctgtaaaattgtttcaattagaagtgaccatggtggtgaattccaaaatgaacactttgaaaagttttgtgaaaaatttggaattaatcacagtttttcagctccaagaacaccacattaaaatggtgttgtggagaggaaaaacagatcactagaagaaggtgcaaggactcttctaaatgaaacaaagttacttaagcatttttgggcagatgctatgagtacagtgtgttatactctcaataggattctcataaggcctattttaaagaaaactccttatgaaatctataaagggaggaaaccaaatatatctcaccttagaacatttggttgtaaatgctttgtgttgaataatggcaaagataatcttggtaagtttgattcaaaagctgatgaggctatctttctaggatattcgttgcaaagtaagactcatagagtctttaataaaagaactttgtgttttgaagagtcagtccatgttgtatgtgatgaaactaacccttctcaagtagaagttttgagtgatattgatgcagaattcaaagaaggaaaacaacagcaagtagatattgaaaagctagttgaggatgaaacaaaagaagatacaactcaaggaacaactacacctaaacacaaggaatggagaacctcaagagatctttcattggacaacattattggtgatgtatcaaagggagtatcaactagatctttatataaaaaatctttgttgtaccatgacttttgtatcaaaaattgaacctaatagcattgaacaagccttattagatgaacattggttgattgctatgcatgaagaactaaatcagtttaaaagaaataatgtttgggaactagtacctagacctttcactcacacacctattggcacaaagtgggtatttaggaacaagctggaagaaagtggcatcataataagaaacaaagctagattggttgctaagggatacaaccaagaggaagacattgattatgatgaaacttatgctccagttgctaggctagaagctattagattacttcttgcatatgcttgtgtaatgaactttaaattgtttcaaatggatgtgaaaaatgcatttcttaatggttatattgatgaagaaatacatgttgaccaacctcctggttttgtagatcatcaatttcctaaccatgtgtaaagattaagaaaaacattatatagattaaaacaagcaccaagatcttggtatgaaagactaagcaaattcttgcttgatcaatcattctcaagaggagaagtggataaaactctgttcatcaaaagaaagaacaaagacatgttgatggtacaaatatatgttgatgatatcatttttggttctactaaccactccatgtgtaaagattttgcagcaagcatgcaaagagaatttgaaatgtttatgatgggagaacttacattctttcttggtctgtaagttaagcaaatgaagaatggaatcttcctaagtcaatcaaaatattgcattgaaatgctaaagaagtttgaaatggaaagttacaaaactgcaacaacacctatgggaacttccacttatcttgattcagatgaaaaaggaaaaagtgttgatgagccgaagtatagaggaatgattggatcattgctctaatcttacagcaagtagaccgaacactatgctaagtgtttgtctatgtgctagatatcaagctaatcctgtaacaccccggacgtgctaacattaatgataccaaaccacgctaaaagcgttgtacatgcggtgtgcggaagcgacaagatcgtttatcttgattacattatgtatgaatttaaaacacaactaaagcataaaacagatagaactgatccagataaaacatacacacaataggcagatatataacttatacagatatactcaggaggaaacataacatacacaaactcaactactgtacatatacatgctccaaacatgaccacaggcgatcatctataaaatatgtacagaaatcgggtgtacacacaccctgctctaaaccaaaactagaccagctccggtcttcaactgcagcctcctccagcctgtcttctccactagggcctcctgccctgaggtcgcttctctgctccagaagaagcacctgaaaaaccacgaaaacccacaaagggtgagacatacgtctcagcaagctcagggtcctgggaaaaacctccctcaccctggttcaccactaagacatacgaataaccaaagaaaagagcgagagatacattctccgctcatacacagattcccagctatctgggatcacatcatgagatgcccaaggcatttgaggtctacacctctcattggcttctagagccatctctcaggggtctaaaccatgcccctggtccagtcatctaactctggctttcgcagcctgtctcctagaggtacatctcatcagtgtcactcactggacactgtgtcaaccagagacgcatcgtctcatactaaacatactatgcctgaggaatatctctcaggacttcacatatccagatatggctcgtctaagaggccctaggctcttatccccttgggaagccctctcttagagatacaacatatctttcactaactggcctggaaaccaaatccaggactttctgttagctgcctgggaagtcatctcactcaggaggcaccatcctcaggacttaactcacatgcctaagagagttcatctcacacaggaggcacacgtctcttaggacttccaacactggcctgaggagtcatctcacaaaggaggcaccggcactcaggacttcacaacactggcctgaggcgtcatctcactacggaggcaccagcactcaggactttcactgcccgggaagtcatctcacacaggaggcaccatccacagggcttctcactacctgggaagtcatctcactacggaggcaccatccacaggtcacaccactacccgggaagtcatctcacaaaggaggcaccatcctcgggtttccactacctgggaagtcatctcactacggaggcaccatcctcgggtttccactacctgggaagtcatctcactacggaggcaccatccacaggttaccatcacttgcctgggaagtcattccactacgggagcaccatccacaggacttatccacactggcctggcaataaccgtccaggacttcaagcacatctgcctgagaccctacgctcaggactttcccacatctctgcctaaggaggaacgtcacacagttccatcaatccttaggacttaagtggagagcagtggcacctcccatggaataccagccgttccagggagtcctcaaacccttcctctggctagggaacctcagctagcccgataccagtccggtatcctataggttccaacactgagcatctcagtgatcatcactcataggcccaaggccatctcacacctctcggtgtctatcctgagtttaccatttcagcctagcacacactaggccatagcatacatatataggccccatggccttttaatccaaacagcatgcccatatacacatatatacatgtgttcacataagcatggcatgcataacatcacccatccgggtggcaaacaagagaaaagggacgaatccccagaacgatgagcttacctcttagccgtgctccacagctctgctccttgcttgatggtctgcttcactgacactcaaagtgtcaagccctgccaaggcacacaacagcacattacagaccattcaacacataagctcatcaggcaaccactcttgcctcagggaaaggaatcacaatcctctccaccaacccaggtcacctatcctaggttcctcaggctcatcacacaacaagcctgttcatagaccatcaatggtctaacacagcttactttggcctcagagtccccacagactcgtttacaggccatcaaactgagcttctcagctcactcaacccctaaccacagggtttctcagggcttgaacggtctaaaccactagactccgttctattggcctcacaggcaccacaagcccatcacaaaggctctggcatgttccaaatcaagtgactcaaccacagtcacccatgcctaatcctagagcccgaaccaacattctccaaatcacaaattgaaggctaatccttcatcctatcagtgttctaaacacttctcccaactagacccagagctaattctagccctatcacagatgggtcactattcacccaaaacccccaaactgaaaatcaaccggagaaactcgagtttcttacctcaatggcgacacacccgacctctagaacgctcctccaagctccggtgcccgtgggtagtcgccgttcctcctcaatctcgagttctctccacctctctgaaggtttctcagaaataggggttttgctcacaacaggatgaaggatttacgctctcaagggttcctttcaagatcaaagaccattggaaggtgtttaggccatgatctaaggtcctagaaagcttaggaaggcctctaatggctgctggggtcgtggggaaagagagagagggtttttccctcagaaaaacgcgaccttcgttcttataatcgctccaccgaccttcccacgcgactcgcacccgaaaccacgcgattcgcgccatcctcactggccttccacgcgagatacgtgaacctccacgcgactcgcgtgaacctgccgagacaccgcgcgactcgcgccataccaccacgcgacccacgtgggataccagagaagaatctggttttccaagccacttcccacgcgatccgcgtcacctgtggcgcgactcgcgccacaccctctgcatggttttctcctgaattcccgcgctatcgcgcggggttaagcgccatgaataagggtctttacaaatccaaagaggtctcatcaaacagctgtaaaaagaatcttcaaatacttaaagtccactccaaaagtaggactttggtatcctaaaggtattgcaatcacttcaatatgttattttgactttgattttccagtatgcaaattggatagaaaaagcacaagtgaaacttgtcacttactaggaagctctctaattacttggcaatgcaaaaagcaatcttgcgtagcattatcgacagtagaagctgagtatatatcagctggaagttgttgtgctcaaagtctatggttgaagtaacaacttcaagactttagtgtagagcttcatcaaattccattattttgtgacaatacaagtgctataaacatttcaaggaatccaatcatgcattccaggacaaagcatattgaaataagacatcacttcattagatatcacattcagaaaggtatcattaaagttgaatttgttgatagtaagaatcaatttgctaatatcttcactaaacctttagatagagaaagattctttacattgagaaatatgcttggaatattggatgaatcaagtttctgttaagtgatttttccataactaatttcatcatggatgtattcaaacaatagcatgattaataaacaactcattatgatgattgaagcaattgttgtttgctgcataaaactcttaatatttgaactaaagctgttacaatcgattacattgagaatctaatcgattttctaatttaatcgattacatctcggattaatcgattattttgttcgtttttgaaacacagaatgagccttgaatactttaatcgattaagtgacaatttaatcgattacatatgcgttttaatcgattatttggtgtaacgactgcttctaccttgctttattatttgttttctttgttaaatttttttttaaataaaaggtaatagcttaaaattaattctttttacattttgaaagaaaacagaaaaatatgaaaatttacgcgtcatctaacggtgtttgagttcacttagcatacaatccattattacagtccataaacaattatcatcatacagtccaatacataaacagtccaaaatacatagccaaatagaaatcatcacaaagtcctcatcatatcttcttgtgcatcatccaaggttaatatcactgttcttctgctcgcccaaaaaaattggggtcatcacaggtgtcaaccacagacacaaaaacagggtaagtcatgataaacaaaatttaaataataattagacaattaattcataataaatgtatgtaagaaatgcatgatgcatgattttcaacttgttaacttatggccatagtcagaatagcttaacacctcgcgagttggatcgatcagtcaggataggtccgtgttgcaataggactcacacctactctacatgtgatcatcatgggtaggtgatctcccctcggactctcccccaactcatcaccttagaacgctctttctcaactctagctatctgacaaacctccttatgaggtaagaatttcacggattaacccccgctgggtatatgaatatggaacatgcataaatacttcttttcatcttatttatttcatcattcatcacacttcacttggtctcatatacatcaaaattcaatgtctttcaagacacacaaagtaagcatatttaacaacagatacacctctttttaaattatcaaataaagcttcataaagccatacaacaccacacggccaccaccacataaatcaattttttttctttgtaatctttcatttttcatataacaaaaagctagattttagttaaatacttattcagccgaaaatgaaaaaataaaatatggataaatgccaatacttattacgggtataaggatatataattcatcgagattctatccaagttttaacaacaaaataaatattcaaggaattatttaaattaaagaaacatgacaagatcaataaactaacttaaagaacataaaatataaactaacttaaagaacataaaatataaactaacttaaagaacataaaatatatgtcatttatagcaaaatatttcataaacaaaataaatctaaaccattaagcatcatataaaaagtttgtaagcatcacataaaaagtttgtaagcatcacataaaaagtttgtgaatttctttgtattttgtttattaaagttagcttaaattatttatctcatcattaataattaagattaaagtctcaaaatcattcatatcatatatcttgagttctttgagtccttccatcatctccaaataatccaacttaaatcttcattagcacaagtattagcttcaaacataattaatatttaaacttggtttatcaaggacttccccataccttgattggttttctcaaaaattgaacaaccttgctccttagctccttggttttcacgtggacttgatcaaggttggtagtgtgatttttcttttggataaaaggtattatatgaaaatgatagcaagggttaaaaagaaaggtgaggtggagtatggttactactccttttgccttgaattggttttgacaaagctttgaaattggtcaaatggagtgcacggttgctttctttccctctttggctgcccaaaaatttcggtccccttgctttatataggaagttaagtcttgattttttactagaaattatccataagtcatgatggctactagcttgtgtgcctttttcttattggttgattaatggactagcttgtaccacacaatacttcctcctccttttattgcacgatagttttttgcttggaaaaggtttttcttggcttcatcttacctaagaagctaagaatttatgatagattccttttgtctcctactactttccactgggctagttcttattggctaatcctcttcttctttgaatttgtcccccaccaccttggctttgctctctttcacgtgttctctcaattgtaggggctgccatgaattttttttcatttctccccgtagactactttagcttttatgccttctacaatattttcctttggattcatgaaatagcaaatcctattttcttattggtctatttcatttcaattaataaaattactaaactatcttagtaaagaagtctatttatcccaaaattaatagaaaactccaaagattatatccatcattttcctatggttttctgatacttaagttagtctgtattgagctcttttcaaaatttctattaaaattcctagaaattttaattcatggtttcttgtcacctatttagttaataattaattatctaaaagtattttatttcatacacaggttcccacaaaatttccaaaatcatttgggcattttttacctaaagggtattttggtcatttatcaccctcgggacctaatcgtcctttctgaaattgtctaagggcattttggtaattatcttctaagagtattcttgtaatttctattttatagggaaggtaacctagtcattattctgcccatatctctgtaatcttactaaattctagtctgtataaggtcctttaatcacatattactaattgatgtaaaatattacatcaatttaatacatatagaaatgttggggtgttacatttggcgcgtgtaatcgattacaggttgttacaaaattctgttataaatagatggaaggctcttggcttggtttgtaacttgaacacctcgaattttctgagtatacacaagtcttctaagagttagaaagtgattttctatgtttactaacttcttggcccactctttaatcttcatgggtattgaatgatttcttgagcaagagatttcaaagtttaatggagagcatgttctgaaattctgtttatgcaattcaaccttgattggtaattcatatgcattcatattcattggatcattaggttgtttctctccttaatcttcgattgtaattttgtttttgtaatttctgttatttgatgttattgtaaaagggttcttgaagcttgggctagagtagtgttctctaggaaagaacagagtagtgttctctggtttttgttcattagaagtctaataaggttttagatttctattctttatctagtattgataaagagagtttgttgtaaagcttgtaagaattgaaatatataatagtggaactctaatctagtgttgattggaagaaactggatgtagcttctcttgagaagtgaaccaatataaattgcttgtgttaattttctttatctttatttctacaagtcatcttgttcatttgttcttggtgtcattatcattactcaacaagttccattttgagctattggtttcttaagcagagtgatttgattgattaaaagcattattggtttaaaagtgattaagatcctttgactttgattttataaataaattttaaaagaccaagtttaaaccaattcacccccttcttggttattgttggtattgctattgtttttagtgaattggttaaaacatggtctttaaaaatttctttgaaacaagcagtggatttggaattgtatcacaaggacaccattaaaaaaaactttcagtcaatcaagactcacccttcacaaaaagcggtagcagaaaatgtatttctgttgatcttgaaaagattatctagaagactaacaatcaatgacaacaagaagagattaagagaaaattttcaataccaagaactatattggttcactcctcaacaagagaagctacatctagtttcttctaaccaaaccttggctagagtttcactattaacaaaaatttgttctttacaagcttacaaaagatcaccctttatcaaccctagataaagaactgaaatctaaaaacccttttagactcataatgatcaagacatagagaaacccttctctactcttccctctagagaaccctactttagacaagcttaaagaacccttttgtaatagcaattaacaagatcaaatgtaaaaatgaattacaaccagagtttagaggagagatacaaccttatgatccaaagaatgaaaatgcatgtgtttaccaatctggaatcaggttgaaagaaagcaagtttcaccaaactctccaagaaactcttttgaaatcttgtccaaaaagaattctatcaatgatgcatgaagatcttgaattatgggacaagagctttgttacttagtgtatcttttctcaaattcagaaggcttttgaaaacagtgaaaattttgaattctgatcttctgttaaaatcaaaagacccaacagctgtttatagaaaattgtttcaactgaatgtaatcgattaaatcgtccatgtaatcaattattttcacttaactaatcgattaatatcatatttaatcgattaaagtgttctctgttctttctggaaaagatacataagcaaagtaatcaattaaaccgctatgtaatcgattaccataaacagtctagcttcaaaaacatgctaatataattgattacgattagatagtaattgattaacatatgaagacttattttgtgttttgtattgtgtaattgattaccattaccttgtaattgattaattagctcttcatggcataagtaacaaattaccatattctggtaatcgattaagtcggtgtaaaaagtggtttttccaaaacttaaacatgagtacttgatatcttatgcaaacatgaaaacctaagctttgttggatataggggagcaacaaaaagaatgaagcctatgacttaagaagaatgttttgagtttttcacatgccttgaagattgtaattcaaatgaagtgtaggagaaggcaatcttttgatccttgcattgcatgcacataatcattaacatgcttaaatgttttcattaaaatatcaaagctattcactatttgaaaaatgatttaattgagtaatgtttttggaaaaatataatttcactcttttaatcgattacttagtggattaatcgattatttggttcatatttgaaattggaaaagctttgatgaacacattaatcgattacacaactcttgtaatcgcttacatagtgtaaaatggattttgtgcattgttgtgttaatcaattaccattattcgtaatcgattacataagctatttgaaaaagcttgcttcactactttaatcgattaccataaaatgtaatcgattacacaagttgtttctgaaataaaacttttctgatttaatcgattacaacttgggttaatcgatcattttgtgtaatcgattacataagtcatttcaatcaattacataagtcatttaaattgattatttggcacgtgtaatcgattacaggttgttacaaaaagttgttataaatagaaaggaggcttggcttgaaactgaacttgaacacttcgaattttctgaatatacacaagccttctaagagtttgaaagtgattttctgggttaactaagctcttgtcccactctttaatcttcatgggtattgaatgatttcttgggcaagatatttcaaagaaatgatggagagcatgttttgaatttctttttctgcattcaactctgattggtaactcatatgcatttataatcattggatcatcaggttgtttctatccattatctttggttgtaaatttgtttttatattgtatgttatttgatgctattgtaaaaggggttctttgaagcttgttctagattagtgttctctagggaagaacagactagtgttctctggttcttgctttctagaagtctaatagggttttagatttctattctttatctagtgttgataaagagagtttgttgtaaagcttgtaagaacaagaatttataataatggaactctaatctagtgtttattagaagaaactgaatgtagcttcttttgagaagtgaaccagtataaattcttgagttgcttttctattccttcatctttatcagttatcttactcattttgttcttggcatcattatcattactcaacaagttctgttttgagctattggtttcttgggctgagtgatttaattgattaaaagtattcttgatttaaaagtgatgaagatcctttaactctgatattataaacaaatttttttataccaagataaaaccaattcacccccctcttggttattgtgggtattcctgatgttttcaattggtatcaagagcaggttcttgagtgttattcaagattactatctttctttaaaagaaaatgaataccacacaaattaccttcaaggaaggtgcctccctcaaccgtcctccaatatttgaaggagagcacttcagtttttggcaaaatagaatgaaaatctttattaaatcaaatgacccaggtgcttggaatgctataggaaaaggccttattattcctataaaaactgttggtaatgatatgattcccaaagaatgggatgaaatgacagatgcttaaaagagagttgtccaatatgattttaaagctaagaatatgattacttctgcaattttctctgatgaattctttagaactgttaggtgcactaatgcaaaggagatgtgggaaatgctggagataactcaataaggtacagatgaagtaagaagatcaagaaaacacgccttaatccatgggtatgaaatgttcaagatgaacaccactgaaagcatatctaagcttcaaacaagattcactcatatagttaatcgtcttcttggtcttggaaagatctttgatgctgaagagctgaacatcaaaatcttgaagtgtctcacaagaccatggtaaccaaaggtgacagcaatcaaagaatcaaaagatctatccaaaatgtccatggctgcactatttggtaagcttcttgtgtatgaacttgaaatgtcacaactaaccaatgaagaaggtgcagaaaagaaacaaaagcatagccttgaaagctacatcctcaaaggtggaaaaagtggaagactcaagtaaagaagatgaagagggcaacatgaatttaattgttaaaaagttcagtgagttcttgagaagaaacaaaaatagaaagttcagaaagaacaacaacaacgacaacaacaacaaaaggagtgacaacaacaacaacaacaacaataggagtgacaacaacttcacttgctttgaatgtggaaagcttgaccacattaaatttgaatgctctatctttttgaaaaagcaaaaaggtgaaaacaagataaagaaagaaggaaagcctaagagagcctatatagcttgggaagataatgattcaacaacttctgaatcatcaactgaaaatgaagaagcaaatatgtgtctcacttccacaattaatgaagatgataatctctctcaattgttagaactgaggtaagttctgaacttgatcaagttattgatgtttttcaagaaatgcatgaagaggcccaaaagcttgtaaaatccattaataagctaaaaggaaatcttagatggcatgttgcaaaaattacaaaattgcaaactgaaatttgtaacttgaaagaagaaaatgaaaaacttgtttcaagttacaaaatgaatggttgtgtatgtgcttcttcttcatctaatgttgacaaatacaatatgttaaaaaaggattttgatgattacaaaagaagtcaaggagaaaaatacatgttactcttatctaagaatagtgatttgatcgatcttttaaaaaagatttacaaaggtaaatgcaacttagctgaaatgttaagtgtgcagaaatatgctggagatacttctagtttgggttacaaacaagactcaaagtcttttggcaaaactatatttgtaccaccaaaacagaaaaatcaaaagaatttctatgattcaaagatcaatcaaaatgcttacttaaggaattcatcaaaatctgtaacatgcaactattttatgatgaaaggacatacatcttataaatgctatgctaggagattctatgtgcctaatggagaatgtatttgggtgcaaaagaagaagaaagtagctaacccctatggacctaatctcaattgggtaccttcctctataaattgatttgaattttgcaggtatgtctaagagcaagatcttcattatggtatcttgatagtagatgctctagacatatgactggtgacatgtcaatgcgcacaactttgactcttaaagatggtggatttgtcacatatggagacaacaacaaagggaagataattggagaaggaaacatacaagacagcttcaaaaccatgattagaatgatgtggaaggtttaaagcacaatctcctaagcataagccaactttgtgataaagggttcaaagtgtcattcaatgacaattgctgcatgatatgtgatggacaaactggtgaggtgattcatataggtaagagaaaaggtaatatctatttactctccatagatcatgcattctttcacaacacttcttgcctaataggtaaaattggtgaatcttggctatggcatagaagggcaagtcacattaacatgcatcatatgaacaagctgattaaaaaggatttaatcattggcttacccaaactcaagtttgaaaaggacaaattatataatgcttgccaaaaggggaaacaaacaaaaaattcttttcaaagtaaaaatgttgtttctaccttaagacctcttgaattacttcacatagatttgtttggtccttctagaactatgagtttaggaggtaattactatggagttgtcattgttgatgattagtctaggttcacatggactttgtttttgaaatccaagagtgatgcttttaatgcttttagaaaattggccaaacttgctcaaaatgaaaaaaggagcaaaattatctcaataagaagtgatcatggtggagaattccaaaatgaacattttgaaaaattttgtgacgaaaatggaattaaccacaatttttcagctccaagaacaccccaacaaaatggtgttgtggagaggaaaaatagatcccttgaagaaggtgcaagaactcttcttaatgagacaaatttgcctaaacatttttggctgatgttgtaagcacagtttgctacactttgaatagattgcttataagacctattttaaagaaaacccttatgaactatacaaaggtagaaaaccaaatatttctcatttaagagtatttggctgcaagtgctttgttttaaataatggtaaagaatcacttggaaaatttgatgctaaagttgatgaagccatcttccttggatattcattacatagcaaaacatatagagttttcaataaaagaaccttgtgcatggaagaatcagtacatgttatttgtgatgagtctaatccctccaaggaggaaaagaagtgtgatattgatgcaggtcctttggaggaatttattcaacttaatgattcaatggataaagaaaaagaagaacaaattgttgaagctaaacaatcaacaccagtctaagagccaaaagattagagaactacaagagatctctcccttgacaatatcattggtgaagtttcaaagagagtatctactagatcatcattgaaaaatctttgttgtaatatggcttttgtttcacaaatagaacctaagaacattgatcaagccttaattgatgaacattagatgcatgccacacatgatgaattgaatcaatttaagagaaatgaagtttgggaacttgttcctagaccttcttctctcaaacctattgaacaaacttgatgagagtggaatcatagtcagaaaaaacgctagattggttgcaaaaggttacaaccaagaagaaggcattgactatgaggaaacctatgcaccagttgcaagattggaagccataagattattacttgcatatgcatgtttaatggatttaaattttttcaaatggatgttaaaagtgctttcttaaatggatatattgaggaggaaatatatgtggagcaacctcctggttttgttgattttaaatatccaaaccatgttttcaaactcaagaaagctctttatgatttaaaacaagctccaagatcttagtatgagagattaagtaaatttctgcttgaacaatctttcacaagaggacatgttgataaaaccttgttcatcaaaaggcaaagcaatgatatcttattagttcaagtaatttttggttcaactaatcaattgttgtgaaagaaattttctatctctatgcagaatgagtttgagatgtcaatgatgggggatttaacattctttcttggacttcaagtgaagcaaatgaagaaagggacatttctaaatcagaccaagtattgccttgaagtgatcaaaaagtttgaaatggataaaagcaaagatgctgcaacctcaatggcaacttcaacttatcgtgattcagatgaaaaggaaagaaagttgatgagtcaagatttagaggaatgattggatcctttccatatttgacatattagtgaccagatattatgttgagtgtgtgcaaaatatcaagcaaattccaaagaatcacacctcactgcaatcaaaaggatcctcaaatatctcaaatcaacaccaaaagttggtctttggtatcctaaaggtgcatcacttaatttagtaggatattctgattttgactttgcaggatgcaaattggatagaaaaagcactagtggaacttgtcacctactaggcagctcactaatatcttggcattgcaagaagcaaattgtgttgctttattaatagttgaagctgagtatatctttgctggaagttgttgtgctcaaaatttatggttaaaacaacaattacaagattttggtgtagaattaaaagaaattcctctgctatgtgacaacacaagtgccatcaacatttccaagaatccaataatgcactcaaggacaaaacacatagagataagacatcacttccttagatatcacatccaaaaaggtaacatcaaaatcgaattcattgatactcgtcatcaattagctgatatattcacaaaacctttggctagagatagattctatactcttagaaatatgctaggcatccttgatgaatctaacatttgctaacacgtttgccttgtgtttattcattggaatagcttcatacttgttcaatcatcacatgtgctttcaaaattcaaaatatgctacataaatattgttgaatctgatattgccactggaataatcgattaaggctagcattaatagattaaatgaacttgaaacatggcttagaatgaattttgtacttatgtaattgattacataactaggataatcgattattcttcatataaaatatttccagaaatgattttctatagaataatcgattaagccattgaattaatcgattacatagcataaaaactctttcaaaaattcaattcactggaataatcgattacagtgaatgctaatcgattaaattgttttaaaaattgcttgaaatttaaattctctctgtaataatcgattacataagagaaataatcgattacacttcatcttcttcatctgaatttcactaaaataatcgattacttgatgaattaatcgatcatagcttcttcagaaattgatttttcttacgaattaatcgattacataagcatataaactattattcatggagttactacagaatctgcaagattttcttggaaattgtaactacccaactgccacctaattcaaatttgaatcttctatgctttaatgttagtgggttaatttgaaaataaatgttactcatttcaaatttgaactttggagcccaaatttttctataaatacagcctatgtttgaagggaaaaatcacaccttcttaaacacttttgtgtttctcttcttcctctgagcccaaaaaccttgtcttgtagcctctcgtccccgttcaaaatgtttgcccctaagagaaccaaatcctctaagagaaaaagtgttgaaacctctaaccctactgtcaataggttagatcattggtttcctgttgagagagacaaaatgacataccttcagttcaatgccaccaaacttatttgtcctcccaaacaccttaccttgactggttcattagagagggtttccaattccctgccttgattgaaacccagggattgagaaagtttgttgagaagaagggtaccttttacatagaattaatgaaggtgttctacacctgtgctaaggcctctatcgatggaacacttctgtcccaagttaatggagtagctatggaaattactcctgaggtctgggaagctatggctagaatttcctttgaaggtgaaaggaaatttgaagaagaggctggggatataatagggtggaaacctatagggggatgcttcttgatctccaaatgaggctggagcttaggctaagcactggcccaatgacctatgaggatagacttctccactagataatcacctatatcttgaccccaagatccataaaccatgcccaagccactgatgatgacatacaaattgtgtatggcataaagaattccattcagatgaattggattcttattcttaatgagataacgcttaaatccaagaggttgatgaagtacccttttccttatgttgttcttgtttccaggtttattaattactttaatatagatgtctctgatgaggttgttgacaacaccaactccagcaatagccttatcaaagagaaacatctcaccaagctagggatggtcaaaacccctcatgtttggcaaatggctggccaacacatccttgctgttggaaatgaagaagaagttgatgaagaggctgaagatgaaggccttgctcaaccattttacaacccatttgaatctcttatgattcaaaagatggatgccttattgtccctacatcataagcacaaggctgagactaattcatctctggatgagatgaaatctaggctaaagaacatagaagctaggcttgtccttgatgactttaataaactagcttaggtttcttgtatttcctcttcttactttactctgattttcttttattttttttctgattgatgtactgtttctccccttttaattaataaagtttttattttctccttctcattatttgttgtgctatctttttgtcttttataagccaaatagggggggaaatattgattgatatctaaaaagcaagcatactctattttgctctctattgtgctctgttttctgctgtatttttcacaaattaaaaactgatgaatttatctaagtgggagcaaactaagtctaaggaagcaactaatgaaagttaatgattaatatttatgcaagcatatctcttaacacctgttcttggaaaagaggctgatttgttttcaggttaacaaagttcaagacttctattctcatccctcaaagtacttcaaaaaattgacatatggtcaatcaaatatttggcatgttcaaagccaaaaagggggaggttgttggatatagggggagtaacaagaagaatgaaacctatgacttagaagaatgttttgagcttttcacatgccttgaagattgtaattcaaaggaagtgtaggagaaggcaatcttttgacccttgcattgcatgcacataatcattaacatgcttaaaggttttcattaaaatatcaaagctactcactatttgaaaaaggatttaattgtgtaatgtttttggaaaaataaaatttcactgttttaatcgattactcagtggattaatcgattatttgattcgtatttgaaattggaaaaactttgatgaacacattaatcgattacacaactcttgtaatcgattacatagtgtaaaatggattttgtgcattgttgtgttaatcaattaccattatttgtaatcgattacataagctatttgaaaaagcttgcttcactgctttaatcattaccataaaatgtaatcgattacacaagctgtttctgaaataaaacttttttgttttaatcgattacaactcgggttaatcgatcattttgttcgttgtgaaacccagaatgaagtcttgaatactttaatcgattaagtgacaattcaatcgattacataagtcattttaatcgattatctggcgcgtgtaatcaattacagattgttacaaaaagctgttataactagaaaggaggcttggcttgaaactgaacttgaacacttcgaattttctgaatatacacaagccttctaagagtttaaaagtgattctctgggttaactaagctcttgtcccactctttaatcttcatgggtattgaatgatttcttgggcaagagatttcaaagaaatgatggagagcatattctgaatttctttttctgcattcaactttgattggtaactcatatgcattcataatcattggatcatcaggttgtttctatccattatctttggttgtaaattcgtttttgtattgtatgttatttgttgctattgtaaaaggggttctttgaagcttgttctagagtaatgttttctagggaagaacagagtagtgttctctggttcttgctctctagaagtctaacagggttttagatttctactctttatctagtgttgataaagagagtttgttgtaaaacttgtaagaataggaatttataatagtggaactctaatctagtgttaattagaagaaattaaatatagtttcttttgagaagtgaaccagtataaattcttgagttgtttttttattctttcatctttatcagttatcttactcattttgttcttggcatcattatcattactcaacaagttctattttgagctattggtttcttgggctgagtgatttgattgattaaaagtattattggtttaaaaacgatgaagattttttaattctgatattataaacaatttttttttataccaagataaaacaaatccaccccctcttggttattgtgggtattgctattgttttcaagcttttttacaaatcatgcgacttgataaaagtcatatatacatgtcaatgaatgatgtttatgcaatccaaggaaccataggatgaagctcttaaacaactaacaaattacatatgtctttaattgaatgacatataaaaaactaaaatatgtgtaagacaaatagtctcatcatcttgatcttcttcaagctcccttgtatctaacacttacttccacatttccaccctagaaaaatttagcaaacatcccttcaatatggttagagatggaggctggtagaagaaagcatcccatcttgtacgttggaatagcttgaacaattttctttattagcacttccgtccctgctcttgataagttgttttccttccaacctttcagttttttccacattttttccttcacaaaattaaaaatccgagtcttggatcttccacaaaagtaggaattcccaaatatttgtcatgaccctctacaacctttacacctaaaagctccacaagcttattgattctggtacttagcagattttggctactcgagagttctgacttctgatagtttattttttgctcatatgcctcttcatacttgttcaagatagatgcaattttctttgcttcttctattgtttctccccaaaaaaagtcatactatcatccaaaaaaacaagtgagatattgggggagctcttggaaaaatcttcaccccatgtattgatcccttacttacaaccttattaatcattgtttgttagagccttgacacaaaggataaacaaatatgggaaaagatgacccttctgtctcaacactctcctaggcttaaaaactcttcctagtatctcattcaacaatactgaaaaagagatagttttaacacatctcacgaccacctttgtaagttttgaggaaagcccatttttattaagatcccatgcagaaacttccattccaccctatcatattctttcaccatatcaagcttcaatgccataatcccctttctttcggtcttcttctgtttcatgtacgtagtgaatacattctaatgcaatcaatgcattatcggttataatccgatattgcacaaaagcactatgattttcactaactatagagagtaggatgatttttaatctattagccacaacctttgtaattagcttgaaccatacactgcacaggctaatcggtctgaactcacttgcatggactggtgatcacagccgtacgcaaccaaattaaattgatttgaatgtagtactaggaagttgattcctaggtcgtctctcaaggatcaattgtcaatgtttaaggattgaaaacgtgtttgggggggtttttgatagaattgggcagaaattaaatttgaaattaaaacagaaataattagaaacgaattgcagtaattaaaaacgaattgcaataattaaaaacaagtcaaaccctagaacagattgcgcctccaatttccttgattcacgaaagatgatctgttccgcttaattcttatcagtccaggttaatcaactaagcgaagattaacctaaaacgtcaattcacgaattaagcaaacgtgaatctcgttaaggcaatttctcagaattaagcaaactgagattaacaactcataatcattaagcatgaaacgaattgcatacagaaccctaacaagaacaaatcaagcagaaccgaaattcaacacagaaacctccattaaaggtctgcaatctgcttagggttcaactctagggtttagccttccattaaattgaaattaacaacagaaacgaattgtgcattgaaactgaacatatcaaaaccttaaatagcagtaaacgaaaatggaacagaaaacgaaattcaactcaacagaaaacgaaaatgaaaatagatgaagcagaatagaattcgaaaagaatagatagaacagaaaacgaaaattgcttctaaatataaaatctcaacgaaagtagaaacagcaggaaatgaaagattagaaaaataaagaagaaagcagaaaacgaaaataaaactaaaacctaaaacctaaaaacgaaaatggtctgtagaatgtagagtgtgtagagtctcttctctcctctgacttctgacggcataagctaaatatatagaaactgcctaacctagacgaatgggctaaccctaacaattttggcccagaaaattactaaaataataaaaaaacaaaattaattaaaactgatgttgacgtggcgctaatcttcagtccataaataagttccaagctcaattaattgttaaactgccctgaaaataaaaattagaataattaaacttaaaataatccaaattaattaaaatccgaattatcggtctaattaaatcccaaatgagaaacaatgcaaaatatagatatttaaacacaactagggattaaaatgagtatagaaagatgagtaaatagtaataaatagtgactcatcaactggattctagcaccagcactattagtgtcttgtttaaatccttacgatctccctcattattaagcacattttaaaacaaacctagcttgttacatcccttcccactatgtgccaaaaaaatgtatcaagcaatcctggagtaccatctatccttgacgcttttagagggtgcatttggaacaacgcttcttctacctcctcttttgtgaaaaccacccgcaacacctctttcatttgttcattaactcgaccttccactaaatcagttactccctctatgttttggattagaggactgaaatagcttctcaaaatgctgagtgagaactacctctataatctcctcatccacaaagggtttccttcatcttcttttatcttgctaattttgtatctctcttgcttcttagacgcttttttttacggaaaaccccatatttttgtccccctcctccagccatattgcccttgacctttgttgccaatattccttttcttgtttctgaaactcatcaaaatcactttcttcttagaaattcttctcacaacctcctcaaactgcatagacttttgaaagatctgtaacatgtttcttacccttacctccttccaacattttttccatctttcattggcaaacaccctatccaatctttcttccactatattaggtaagcttctcttattggaccatgtatatttgtatccttcatagcccaaatcgaacatccaaattcctccatagtttccctatatttttccagtttatctgcccccctctactcttttcatccgagctcaatacctcattaaaatcacactttttgcaatctcaattcccctcgaaggcctgatttcactcaataattaaactctcactactattgatatttgtgtctctcacatactttgtcatcgtacaaagagaaataattaagacaggagaagtacgtaatagtctaataaatttggtttctcttgattttgtgacacccaatgatattttttttcttcgtggtttgaaatcaatcttttccttcaatggttttaggttgtaccagaggctgctaagacttaggtgcgagcttgccagagtcatcaatgattagatgaaagataagataatatatttctctatttacattatctaccagaaagatagagatattttctagaattggatatcatctattattagaagaaagataagataaaattatatccttctctatttgcattatcttagaagggagattgagattaaataatccaatctcatttctataaaaagggatcaccaccattgtactcggaagaacacaaggaagaacatctctttaacaaagttctgccaaaattagtaggaacatttggcgtgtggagtcctatatattagtgtaatttagttagttagttagtttgttagagtctatgcaaattaaagtgaaaccttgagctgtgtataaatacaccatgatgttgtcattactctgtaatgttagaaaaaaaacagagcatatacataatagctgagtgaacaaatgattcactgcagttttctctgattttcagtgtgtgcatatgtgtgggtgtgtgaaacaccaagatacacaagtgagtgagcattttctcatcaagcaagattgagtgtatgtgcattcttgcactatcagtggtatcaagagctgtgtttcagatcctggttcttgagagaaagcatggcattcccgagtggcaatgttcctatgaatcttccgatcttgatagcaaagaattatgatagatggagctcgcagatgagagtgctttttcgatttcaagatgtattggaagaggtgattgatggagtcaaggagcttgggaggcagccaacagatgatcagaaagtagcccatcaagtaagtctaaagaaagatgtcaaggctctcttcttgatacaacagtgtatggattcagagaattgggagaaaatatcaacagcagaaactgcaaaagatgcatgggacagcttggctcggttctatgaaggctccgacaaattaaagaaggtgaaactgcagaccctgagaaggcaatatgaattactgcagatgactgatcaagaaagtgtaagtgattactttgcaagattgattactcttacaaataaaatgaaagcttgtggtgaaacactatcaactgcaacaataattgaaaaggtgctgagaacattgactagcagattcgaccaagtggttgttgtattggaagaaacaaaggatcttgagtcaatgaaaattgaagagctgcaagcaactcttgaagcccgagagctgagattgaatgagaggagttctgcgaaaactgagcaagctttacaagctctgttcaagcagaaaggaagtgatagaagaaagaattacaaggagaaaggaaaatggaagaactgcaagtggaagaatcaagaaagaggccaaggtagcaattctgagtagaatcagaatgctggaagctccaagaaacatgaagtgggcagaaactacgagaaaagaagaatttcgaagaaagatgtgcaatgttacaactgccaaaagtatggttattatgcatatgagtgtagaggaaagaaagtgccaagaaagcatgaagaagaagcacaaatggctcatgaggaagattctgaatctgaagaagttctgttgatggctactacaaattcagaaaatgacaaatctgatttgtggtaccttgatacaggttgctcaaatcacatgtctagtcatagagaatggtttacaaaccttgatgaaagtgtgaagaacaaggtcagatttgcagacaatagcactgtaactgctgaaggattagggagagtaattatccaacagaagaatggccagcaagctgcaataactgaagttctttatgttccaaacatgaagactaacttgttgagtctcggtcaattactggaaaaaggctactcaatgaagatggagcacaaccatttgaaggtgtttgatggtaaaggtagattaatcttgaaagcctctctgtcagaaaacaggaccttcaagattggtgtttaagtcatgcaacatcattgtctggctagtgaatgcagcagtgagacctggttgtggcatcaaaggtttgggcacttgaattttagaagtttaagcctactgcagagtaagaatatggtcagaggtcttccttcaattgttcagccaaatgaaatatgtgctgattgttgtgagtccaagcaaactaggaaatccttcaagtcagaaattcctatcaggacaaccgaaaagcttgcagtaatttcttcagatgtatgtggaccttttgaggtaacttctcttggtggaaatagctactttgtttcttttattgatgagtttacaaggaaaatgtggttgtatctcattaaaaggaaaagtgaagtgctgaatgtctttcaaaagttcaaattgatggctgaaaaacaaagtggaaagcaaatcaaaatactgaaaactgatggaggtggtgagtatgtctcacatgaatttcagaaattttgtgaccaagaaggaatcatacataaggtgatagctccatacacacctcagcataatggaacagctgaaagaagaaacagaactcttcttgacatgacaaggagtatgctgaaaacaaaaaaaatgcctgcctatttttggggagaagcagtggctactgcaacttatatcctagatagaagtccaaccaaaaggctgcatggtatgactccagaggaaacatgaacaggtaaaaggcctagtgtcagtcatttcagagtttttggctcattatgctataggcatgttcctgaacagcttagaaagaagcttgatgatagagctgagcagatgattcttctgggttataccttaactggatcctacaagctgtttgatcctaagaaaaggaaaattgtaataagcagtgatgttgtggttgatgaaaagaatagctagaattgggaagctagcaagacagacaacaatgttgacagtgttactgtgagtcttgatgataatcaggataatattggagctgctactgaaaatcaagtcagaaggtcacaaagagaaaggcatgtaccaccaaggttgcatgattatgagctgtttcctgattctgcagtaacaacagaaggtgagcttgtgcattttgccttattagctgaggcagaacctgtcagtttcgagcaggctatgaagagtccaaattggagaaacgccatgctagaagaactcagatcaattgagaagaatgagacctggaaattggtaactttgccaaaacaggagagacctattgatgtaaaatgggtttacaagacaaaaatcaagcctaatggtgatattgctaagtacaaagccaaattagtagcaaagggcttcttgcagaaacctggtctggatttttatgaggtctttgcacctgttgcaaggattgaaacaataagacttgtaactacattggcaagcttcaaaggttggtcattataccaattagatgtgaaatctgcgtttttaaatgggccactagaagaagaagtttatgtctctcaacctcctggctatgaagtaaaagggcatgaagacaaagtatacaagttaaagaaggctttgtatggtttgaaacaggccccaagagcctggaatatgagaattgatggctttctaaagcaattgaaatttgtcaaatgcatcacagaacatggagtgtatgttaggcattccacagcaacaagcatattgataatatgcctatatgttgatgatctgctgataactggaagcaatgaaaaagaaattgcagatttcaaaaccagaatcatgaaagagtttgatatgagtgatctaggtgtgctatcctacttccttggcattgaatttactcataccagcaagggtattttcatgagtcaaaagaaatatgctgaagatgtgttgaagaggttcaacatgatgaattgtaactctgcctgtacacctgcagaatctggaatcagattgcagaaggatggcagtgatgcagcagtagatcctacttactataagcaaatagtaggttccttgagatatttgtgcaacaccagacctgatttagcttatattgttggtgttataagtagatttatggagcatccaagggtatctcatcttgctgcagccaagagaatccttcgatatgttaaaggatctctagattttggcattttatatcctaacaagttaaatgaaggtgtagctgaattgcttggttactgtgattcagattggtgtggagataaggatgatagaaagagtaccacaggctatgtgtttatggttggtggaaaaccagtttcttggtgttcaaaaaagcaagatgttgttgctttatcatcttgtgaagccgaatatgttgctgcatcagtagcagcctatcaagctctttggttagaaactttgcttgaggaattgaagcttagagaagcaaaaccagtgaagctactgattgataataaatcagcaattgatttggcaaaacatcctatagctcatggcagaagcaaacatattgagaccaaataccatttccttcgagatcaagtcagcaaggacagattggaaatgcagcactgcagaacagaggagcagctagctgacattcttaccaagccattgaagaatgctaagtttgtagaactgagatgtaaactaggtgtacaatctataactaatctaaattaggaggtgtattggtgtaattcagttagttagttagtttgttagagtctatgcaaattaaagtgaaaccttgagctgtgtataaatacaccatgatgctgtcattactctgtaatgttagaaaaaaacagagcatatacataacagctgagtgaacagatgattcactgcagttttctctgattttcagtgtgtgcatatgtgtgggtgtgtgaaacaccaagatacacaagtgagtgagcattttctcatcaagcaagattgagtgtatgtgcattcttgcactatcactatagagaataaaaaatagataaatcatcagtattataaatgaccttgttcactgttaaaatgttaatgaaccgatgacgtatacacaataactattgacgtgtggagtacataaaaaagcatgttgcatgttgttatgttaagccattataacatcatatgtacgtgatcatcttatcatcgagcaattagtttcttgcttatgctataacattctgccactgaatgatatatgatattatcgaaactcctcgcttacaagcgaatgacaaaaaatcagtgtaaatatttacttgatcataaagcgtgtatttggtatatgagctaaaacaaatagtggagttgttggtatcgtaatttttgataagtacaaatcaaacaaggattttgtattatcttattatttatcctatattagcaatttcatagttagctataaaacaactttcaggaatagacaaccttatcaatatttttcaaaaaacatctagcttctaactttacatactttattatcatgtaaaattaacatagcacacatatacatatagtttcaagttgcagtgagtgtagacattatgtcatattaatactatgatatgctatcataaaagttagagtaactttaatgtaatatcttgagtaaggattttgaactcaagatctaattttcactagatctcccaataaagaaggtagagagatctctaacatgaagaatgagttcttatagaagaacccttaagatctgcacattgttcaaaaaagaataatttttttccctctttctctctccctaagatctcaaaatgagatctatcattaaagaataaaatgggagagatcttaaatactacgtgacactatggatctaccgaaaagtggtttaatatctcaatttgggatctaccactaaagatggcaatgccttgactgataccatatatatatgctaaaatgcaaattagtattcacttggaaaaagttaacgtacgtgtgcatgacataaggacacaaagcttaatgtgtgcatgctaaattactgaaagcataatccaagactaactaaatacccacatgcaaaaggcacgacccttaacagtttagacaagagtgcatgagttttaaatgtcatcataaacatgaatagatattatatcatgtcatattatatcatcataacaccgtgtcattttatgctattatataaatgttgggaggtgatgtggtaagcctgatacaccaaaatttggaagtgattttgtgatgaaaataagtcatgagcaaattatgtctaacaatgggcataattatactttctttcaattaaaccaatcgactttttggaataagccaatttcaactagatcaatactcactagtcgagaataatagatctaaataaactcattgactttttggactatgactagatcaatatcgactagttaagaataatagatccaagtttatcaactggcttattggactaagactagatcgaggcccactagttgagaataatagatccaaatagactcatcagcttcttggcctacaactagatcgatacctactagttaagaataatagatccaagttgaaccatcgacttcttggactacgactagatcgatcaagaccgactagtcaagaatagtagatccaagtttacaattggcttcttggactaaaactagatcgaggccaactatgtcgagaatattagatccagctaaactcaccggcttcttggactaagtcaattttgactagatcaaaacagactaatcagaaacaatagacccaagtagaccaattgaattcttttgctaaatccaactttgactagatcgagaccaacttatctagaataatagatccaagtaaactttccgtctttttagactaagtcaactctgattagatcaagaccgactagtcaagtagactaattaacttcttggactacgactagatcgataccaactaatcaagaataatatatccaagtttatcaatctgcttcttggactaaaactagatcgagattgactagtccagaatattagacctaagtatattgatcggcttcttggactaagttaactatgactacattgatacagactagtcgagaatattatatccaagtagactattttgctaaatcaattctgactagatcaagatcgactagtcgagaacattagatcaaagtagacaaaatagattattggactaaatcaactctaactagattgagactgactactcgagaataatagatccgattaaacctatcggcttcttagactaagtcaactctaataagatcgagatcgactagtcgagtagactaatcagcttcttggactacgactagatcgacaccgactagtcaagaataatagatccaagttgactaatcagcttcttggactaagtctagatcgagaccaactagtcgagaatattagattcaagtatattgaccaacttcttggactaagtcaactacgactacatcgatatcgactagtctagaatatcatatccaagtagactaattggcttcttggactacaactacatcgatactaactagtcgagaacattagatttgagtacaccaatcgacttcttggactaatcaaactctgacttaattgagatcaactagttaaaaatattagatccaagtagagcaattgacttcttggaccaaacgaacttcgtctatatcgagaccgactagtcgagaatgttaaatccaagaagaccaattggatacctggactaaatgaaccttgactaaatcgagattgacgagttgagaatattacagtatccccaactcaaagattgaagaatgatggcacttagaatttgaagtgaccaaatagacaggaactctaagttccctgtagtcaaaacaactattgagaaagactggcgaaactccatgattattcaacttaacaaactcccaactaaaccaattgaagattgcaattactaggtagaacaaagagggtctacgaaccccctagtcttgatctaattgcaattactcggtagatcgaagaggatctatgaatcccttggctcaaccaatcattctctaatcaattaaattagaggattttatgcggtacttagctaataaaagaatgcacgcagcattcctaattgattatgacctttactcaacatctaggattgaccctaagagcattttaagtcgactacttaaacattacaacatgagttaaacaaccaacactcagctcaatgaacctaatgtagggtactccaacatttatcaattctctagactcaaagttttaggggagcatgtgcactactaagtcttgtcaaggctcgtctagaaagcacttgaccaattaacgattaggacctatcaaatgtcactcgattcagggaacccaaaggcaaataccatccaaccttgcgataggtgaaagatggaaatatgaccctcaaatagacaaaaagtgatatcatttcattaatcaaaacatggataccctatttgatgggcgggatggacgtgagcctggaatatcctaaaaacatctcgacaaagaaagacataattatcacaatttcctagaaaacgtatgacaacattcaatgcgtctaaacagagtaacagttgacaagatgtctcttcgaatattcaaccaaatggattcgagagaagacaactaccccatccatttccctttaagattaaggtaatccttggttaaagaggaaatcaaaatccttctcgaacttgactattattagactagtatgagtgctactcgaactcgattgattgatagtgacgtcagagtagaggacttagaagatttttacaaagctcctacaaccaactttagagcttgggggcatgtgtactattcggactcaacaagcctctgtactcagtggtcgaccgagtaacctatacgaaatacagagaatcttatagatataattaaggtaagaggaaaaactctatcttttatcagaaagatagagatatcccctaaaactgatattatctattattagaggaaatataagataaaatcatatattttctatttatattatctactagaaaaatagaaatatcccctaaatcaaatataacctattattagagaaaaataagataaaatcatatatttctctatttacattatcttagaagggagattgagattagataatccaatctcacctctataaaaggggatcaccataagtaatttattcttatttcaacccacacattgatatttgtctttctctatgcctccaacttgagcgtcagactgtcttcagtgttacaccccaccaccgtactaggaggagcacgatgagaaacatctccataacaaagttatgcaaaatcgataagaacaattatatattataaatcttggacaaaatgaaatggaatctaatctattatgtatcattttattctaatttaatgaatttcaataattgactatgtgtttggcaacatatgtcagataaatttattttttttaattagcttgaaaaacataataacataacataaaagaatttcaattttatcgtgctccattccatcacttttgactaattcatagctataggctgtaaaattaattaaaagggagagattaggttaaactctccccacaatagcaacttcaagattccaacctcaaacattagagataaagtttgtatgaggtcataatctaatttcaattattaacaatcactatgtgattaataacttcatttttttttcatttaatactaaagaatgttaatatgattttacctaaaattttataattatttttactgcgtcactttcttttttggtgtactttgcttcatcatcatgttccttaaagttgcttgctttttcgttaaaagaagcttgcctttacggtgccgactctactgtttcaccaaaccaaagcctttacaataagttcaatggctacttatacccattttaagagaaaaaattaactaatcctcacatggggaaagtcttgtttctactaataatgggggaagttttgttttcataatagatataggactaatgactgcagttggtccttatttgatatgaatttctaactgaaacatatattatactaagcaagtattattattttttatatattatatataaataggatagacaactgacaagtcacttcaagaatatctgtaagattgttagtcttcagttcacccagaatcttaattatctttcatattcttttaatttaatagttaaaaatgagttacttaatccaattgttaaattaaaagtaaaataaatataaatatgtatgatttatttcatactaaatagttaattaaattcaaactttagatcacttaaaaaaaatataattgtgtcaactattattaatttatctatatatatatatatatatatatatatgaaggcttagatattaaaaaatttcttcacaaactaaaattatatatagactactcaaacattttttttaaataaaagtaattacgtatttaacataagttagttagaatatgaacagaagagtttaatgttggtgaaaaaacaaaaggttaactaaatatgtagtttttaaagtttttcaaaattcaattttttgttcttaaataaaagattgactgctcaaattttttaattaaaatgttaagtttttgaataaaaatttgattgataaagatttctaaacttttttaaaaattcagttttagttcctaaacaaaaatttgaatcttatttttttatttattaaatgagattttagggaaaaaactggatttttaaaaagtttagtgactttaattggttaattttttttttcaagaacaaaaggccttaatgaaaaacatttaagaaacattgactaattaaatctttgttcagagtctaaaacttaattttaaaaagttaaagaaaaaaaaaaacttagttaattcccccacacccccaaaacaagggtacaccagtcttaagttggattgattaaaacggaatggaaatgcccagttgaatttgtgtttatttaagaaaaccatttactttaagaaaaagtgtcagataaatgtctaatatcagagaaaaataatttataaaaacacgtgtcaaaattcactttaattatatctctgtctcaaaagaaaatagttttcgacgagtgataatcttgatgcatataaaaaataataatttgtccttcccttttccttttatgattattatgcattttttattcactatcttaaatgaaatgtttacgagtgtaacatggcctggtctagtttaattaattaattgagtaaaatactataaattctctaatatttatatctgatttttatgaatatataaaaatgagagttacacatataagtctctaatatttaacacgacttttgtctattattttatatagtatttttcacataattattgtttaggttacagcattaatttttagtctatcatgtttatatcgttattgtcatttatttttatgcgtagaatttgaattcaaatatcatgaaatttataacagtacaattgatgcacataatttaatcaacatattaaattagactcgtttgatacatattaggatatatgtttagatcattttgttagtgtataaaaaaaatatcaactagctagtctaatacgaacattttttttattaatcaagatcacacatttttttataaaccatacttttgtttgtgttggaaaatggtttttgctttcatttgttcttgtttatgcgtatttcattgcaaaactcatgttttatgctatgtgtgtaagtgacaggatggcccttgagagaataaacatgaaaagcttataaaggtgctgaaatcaaaagagaatccttgaacaacacgaccatgctctttcaagaatttggagacaacgccgaaacatcctacaatggtcgtgctcccttccgcgagtctgatacacatgtttggtgcatgctattaatagaaatgggatggggaaattatgcctcatttactctgttcaaaattataatactttgagtgagacagcaactctgagggagttctaggggtagaaaagaacgaagaacaccagtggagtttggaattgtaaaatttcttactctcttattcttcatgtatacatgtatatggtgttgttaatttgccttactgtgcttatggttggctaatttttccctttcaaggattatgatgtaattgtgcttgtaaatcccgattttttttattttaattgaatttcgtactatttagtcaattgaactgttctactaattttaattgttttatatttaatcactctaatattttagtcaattatttgtaagtgagcactttcttataatgggtggaattgtacaataatcatggtcataaaataacgaatggccaaacgtatttcgtaaatttttaactatattactaatctttaatctttctctatgtttatgcttatcccaattgaccaaatagggattaaattaggaaaaagacgatttatagtgtttgatcttaaacctgatgactattttaagagaaggttggcaattgcaaaataattaaaaaaaaattaattcaaataaaaaattgggaaatgacattgcatgattacaatcataaccctaaaattttctatttgttaatctcttgatttgtaaacggtttgttctttcaattttatttcccgcgagtaattaagccacctttttccaattgttgattaaaactaaattgtttaatttattgtaaaattatattattttgcaaaaacaattagttttcatgatacagttgtcttagtgtgaacatattttactcattcatcttttatgaaagaattgtgatctagttaggcgtgattatcatggatgatctattggattgggcttcatcctccaatgttgccccaagcccattgagggttctaaaaccctaaaccttcttcaccactataaataccttagttgagggtggaggccgtaattttgagaatcagagagcatagcgcagcgtagatggaatttgagagtctcaagtgacattcttgagtgctttgagcaagttgggtgctttgcatttgagagatctctagagagagtttgagtgaaacactctggggagtttgattatcaccattgttggagaggttgtgtgaaccaccacattggtgtattttgattctttgtaacccattattatcatagtggaagtttgattttggactaatgccccttgagtttttacttcttcacattgaagaagattttctcacgttaaacatattgactgtgcttttctctatctctctcctctcgcgcaattttgtttcacttccgcaatccatttgagggtccttcttgacccaacagtggtatcagagcctgtgtttgagggttctgaaggagacaagatggagaccagtggcataactcatgacgaagatatgttcaacctaaccgcggacaacttcacttattggagacctatgatgaaagatcatctctattgtaaagatttgtatgattctatcgttcttgacgaaagaccgactggcaaaactgacaaggattgggagatcctgagtcgaaaggcggttgccacgatcaggaaatacattgacaaaagtctctttgagcacgtgtctgagtttatgaatgcgtacgaattgtggaacaagctggaatccatgattcagaagaagactgtcaagaacaaaacacacctggttcgcagacttgtgaagctagagtacaaggacggcatgagcatgattgagcacctcaacacctacaaaggtattttaaatcaactctccaaagctaatatgaaaattaatgatgagatgcaagctttgttgttgttgagttcgctgccagaaagtttggatactttggtagtgacattgagtaacttggctccaaaaggaaaattgacgatggatgtcgtgattgacaatctcctgaatgaagaagccatgagaagagaacgaggtgtttccagcacatatgaggccaatgtggctaaaaatagaggaaaatttgagttccggggtagaagcaagagccggagttgaggtggacaagataagtatagaggccaatctaaacaaaatatgatttgaagtgtttctactgtgggaaggtaggacactagaagactaactgctggactctgcagaaagatgtgcagaatggcaatgtgaagtcagatcagattgttccgaagaagaaggaagacaagaacacaactgcggtggttgcaaatgctgaagccgagatatttctactcggagaagaaaattttttgaatgttgcttatgaagactatgcctagatagttgactcaggtgcctctttccatgttactcctcacaaaacttttttctcatcatacaaaagtggcgacttcagagttgtgaagatgggaaatcaggtgactagcaaaattgttggtgtcggtgatgtaaccctgaccacggatgtcgagtgctcacttgtgttgaaagatataaagcatgtgcctgacatgcgattgaacctaatctcagttagaaagctagatgatgtcgggttagtgaactattttagaggatgtagatggaaattatccaagggaaacttggtgatggctcgaggtaagaaggaaggttccttgtatgtgatgcaaggaaagaaataaatggtggagaacccaactcagtccgtgatggatctagtttggagatatggcacaagcgttttagccacatgagtgagaaagggcttcagattttaaagaaaaatgagctattgaccgggttgaagggtcaagtgcttgagagttgcacgcactgcctagctggaaagcagcaccgggtttcatttgtgagaccaaatcaacctagacgacgcaggtatattcttgacctcgtccatactgatgtttgctccatgtctgagagatcacttggtggaactcaatattttgtttctttcattgatgaccattcctgcaaagtgtggatttattttttgaagactaaagaccaggtactccaatcattcaaagaatttcatgctatggtggaaagggagactggcaagaaattgaaagtggtaagatctaacaatggtgatgagtattgtggtccctttgatgcttactgtagagaagttgggatccgacttgagaagacaccccccaagactctgtagctgaatggacttgctgagaggatgaaccagacaattgaagagaaggtccaaagcatgttgtccaatgtcgggttgccaaaacattctgggagaagctgtcaaaactgcggttaacctgatcaacctctcaccatcacgatacttgaagaagaaattccagaagaagtctggaccggtcgaaaatcaacttacgaacacctgaaggtgtttggatgccgagctttcgtgtatatccctaaaaatgaaagagtaaatcttaatgcaaagatgaaggaatgcatttacctcgattcgccgaaaatcaagttcgggttcaaactttgggatccaatcaataagaagatagtgagaagatgggatgtgatctttcatgaagatgagaccattcatgacatctcgaatcccaaagtccgggttactgtctgaagtgaggaacccatccccattgtttaaactgaagcagggggagacccaatgaaggaaataatgaatagaatgactagcaacaagctgatgaggatcgagatactaaggtccgagttgatgaagaggatcgggatgagaatgatgaaccgagttctcaatgtaataccctgagttctaagcatagatttaagccttgtgattagctttggttagaggaaagcttaagaaaagtaagaggtagtgtcgacctttcctcgagatccgcgtggggtttcgcccgatctgcgcgggatgttagaatcagagtaatgctttcgaatagctggcgcgatccgcgtggatacggcgcgaccagcgtgggagattcgagcagatgacgcgatcagcgtggctgtggcgctatccgcgcgggagctcaaatcaggactgaggattcgaacatatggcgcgacttgcgtgggtatggcgctaactgcgtgggatgttcgaatatatggcgcgatccgcgtggggtttggcgcggtccgcgcgggaggttgaatcagggctatgctttcgtccagttcgcgcgatcagcgcggggcacggcgcgatccgcgcaagatctttagaccagccttatatcagttcgtgctggatgcgaaaaagagggaaaagaaaggcttctttttcctccctctgccctagactccattgttgacatcccaagcttcctagagccatatatcttgaccaaaacacctttttatggcctattcttgtgagagaaacaccttggaagcttgaatcactcatcgtttctcttcaaaaaccccttttgagtgagttttggaatccccaaagaaaagctcagagaacttgagagtggctgaggcccattgcgtggaaaggacaccagagctcggagaggtggtccttgggtcttctttgttgccattgaggtaagaaactcaagtttctccgtctgattttgagtttgagggtttgcatgaacagtgacccatatgtgatggggttagatttagcccagggtcctgtggagatttatattcaaggggttgttgtgatgatgttagagccttcagaaatcattattgatgaagtttgattttgactctgagctacacatgcatagagaaagggctggatgtagggttattgtgaaccctatagtagatgataaagttgctcttgggatggtatagatgttgtttatgagctgatatggattgtgctctgagcttggatatgataaggctaaggtatagatatgcttgtgttagcctgaatagagtcttaggagaggctctggagccttggttaggctgagaggggtcctagtgaggatccgagaatcacttgtgaagtgattaatcatgtgtcctatagaaaggattgtagttcctttcgtgctaatggcttaggaccgttattgatacactatgtgtttgcttatgtaggacgtgagcttgatatctttggtggtggtggccacgataccagggaagcaggtgttttgcttagagcaggtaagctcttggttcttgtttgtatgttctttgctgtgttccaccatgctccgaatggaggaatggttttgatgtgaataactgtatgtatgtggaacatgaatgtgaatgtgattgactacaggatggtattctgtaccctgtgatgggaattgatgtatgttgacgtgaaatgctaaaaatgtgatttaaaccctgtgatgggggaatgatatgtatcgatttgatatgcttgaaatgtaagctggatcctgtgatgggagacttatattcatgactatgaattgtctggcttatgatatgtctgatgaactgttggaattgaatgtgaaattgtggtatgagcttgatatgtatgactatgatctattcagcctgtgataggcgtgattgactattagattgactgtgaattctatgaatggatataatcctatggtagtaggatagatgactggagattgagtaagacctgttgtgagatgttcctgtgatatagacgtagcctcccgaatggagatgttcctatattcacagacgtagcctcctcaagcaattgcgttgagatagaatatgagatgttcctgttatatagatgtagcctcctaaagtggagatgttcctatatatacagatgtagcctcatatagatagtggagatgctagtatgagatgttcctgttatatagatgtagcctcatagagtggagatgttcctatatatacagatgtagccttatacagatgattgagatcatggcatgagatgtccctagtatatagatgtagcctcttgaatgaagatgttcctatatacttagatgtagcctctgcaggatgatgattcatgcgatgaacggttgtaggccgtgcttaggacacctgagtattgacaaatgaatgtgagttgagatttttgattgcttgatgattgtgagaatgatattctgatgatgaaatgttgagagtagttggtttggatatactatttcatgtgtatgtttggaagtgaaccagggaaaggaaacaccttcaagggccctgagtttactgagattttatatctcacccctcgtgtgaggcttatgttttgcaggtgaatcctcaggaggagcagacagatcccaaggcaagaagcctatgcagggatagctgcgatttgtaaaaccttaggctagatgacatgagcagatggctctgatgttttgtataccgcctttggttttgttttgtaccctgaggggagatgtatgtacagttttggtactaagacacagaaacttcatgtatattcaccatatgataatgtataatggctatgttaatgacatttgatgatgtcatccttattcttatgcttcagaactgcttaaactctgatgattattgttattgatagtaattaaggcaggttaatgaccccggttttagttggggcgttacactcaagctgatgaagaagaacacctagatacccactagagaaagaagacctgatacaaggtatccttctaatgaatacaccatcattgttgaagatagtgagcctcagagttatgatgaggccataatgagctcaggaaaagaagaatgggagaaggcaatgcaggaagagatgaagtccttgcacgagaaccaaacttatgagatgatcgagcttcccaaaggaagaggagctctaatgaacaagtgggtgtacaaaattaaaaatgaagagaacggataaaagccgagatataaagcccatattgtagtgaaaggctacaatcagaagaaaggggttgattttgagaagatcttctctgctgttgttaagatgacctcggtccaaactatattagccatggcggcttcaatagacctcgaggtagaacaaatggatgtgaagacaacatttcttcacggtgagttggaggaaaaaatatatatggagcaacctgaagggttccaagcttcgggatgtgaaggcatggtattctggttgaagaagagtctctatgacttgaaacaagcacatcgacaatggtataagaaatttgaatccttcaagaatgagcacaagtttgtaaagacagaagctgaccactatgtatttgtgaagaggtatgagaatagagatttttttatcttgttgttatatgttgacgatatgctaattgtagggcaaggtaaaatgaagattgccaccttgaagaaggcgttgaactcgtccttcgcgatgaaggatctcagccatgcaaaatagattcttagaatcaagataatccgggataaaaagaagaagctactatggctgagtcaagagaaatatgttgagaaaattttgaagagatttagcatgaacaaagccaaaatagttagcaccccctagctagacacatgaaactgaataagaagcagtgtccgaggtttgatgaagataaagacgagatgctaaagatctcgtaccaatccatcgtcggaagcttgatgtatgcaatggtttgcactagactcgacttggcgtatgcagttggaatggtgagccggtatctatcgaaccccggcaaagagcattgggaagcagtgaagtggattttcaggtacttgagaggaacaaccaatttttgcccccgttttagagatggtgaagccgagttgcaaggctactcggatgccaatttagggggagacgtcgactcaagaaagtcgactactggatacttgatgacacttgcaagagaagctatttcttggcaatcaagattgcagaagtgtgtggcactttcgacaaccgaggtcgagtacatagcgcaactaagtcttgcaaagaaatgttgtggatgaagaagtttctctcagaactcggccatgaacaagacaagtacgagctaaagtgtgacaatcaaagtgcaattcatcttgcgaagaactcaacttatcactcccgcattaagtatattgatgtgatgaatcattggatccgggatgtggtggaagatggacaactcacacttggcaaagtggacaccgaccagaattggtatgatatgatgacaaagccgatatcagcaaggaagattgaaaattgttgtgaaaggtaccgcgttgatgaactcgactcattgaagatgtcaggctgtcattatagaagatgtcgggttgtggtttgaacttgtcgcattgaagtcgaagggggagaattgttggattgggcttcctcctccaatgttggcccaggcccattgagggttctaaaaccctaaaccttcttcaccactataaataccatagttgagggtggaggcggtaattttgagaattagatagcgcagcgcagcgcagcatagacggaatttgagagcctcaagtgacattcttgagtgcacatttgagcaagtcgtgtgctttgcatttgagagatctctagagagagtttgagtaaaacactctaggaagtttgattatcaccattgttggagaggttgtgtgaaccaccacattgatgtattttgattctttgtaaccattattattatagtagaagtttgattctggactagtgtcccgtgagtttttacttcttcacattgagaaagattttctcacgttagacatattgattgtgtttttctctatctctctcctttcatgcatttttgtttcgcatccacaatcgatttgagggtccttcttgacccaacatgatcatattttttgttaagtatttaacataattgcatattcacaatttgaatttgagacctttagtttagttaaaaacgactttaggataattgatccacacactaagtgatttagtattaacatttagatcaattcaaggataatatatatatatatatatatatgaaaaataaaaaaatacatttatccttgtatagtttgtacgcctaagtcaatacatagatagctagactttgcaatttgctaaagttttaagaatatatctcgatgacttcacccttattcttgatttgattctcttatctcttacgtggagtttggcagagagagaaaaagaacaatagagaaaaaaaataggtaagaaaagataaaagaaaaggaataaagtgaaaatatgcaagtgagaaaagataagagaagtagatgaaaaataaagtgaaaatattagttgtttgatttaagaaaaattaacatatatatatatatatatatatatatatatatatataaaagaacgataaaaaagcaacatgatccattaccagcgattttgaactctcataaatgctatcaaattgcatttttcgtggttttaagccctggtaaaatcaagcaacataattgattatgttgcaatgataaatcaattatataattgattgaatttgtacattttagttgttactggtgggtttaaatccctataaatactacacgtttacattatctttctgtagttttgagctttgacaaaaataactcggctaaatatcaaacacaatactttctactattcattctcgcattattttggtcagaaatgaaaaagtgtgagacttggatccttttttaatttctcttcctccttttttcaacattcccaaatatcgatattttaaatcttaacactatcgatctgtttgggtaaatttttataaaaatacttctaaaagaagaaaaatatgatatgagtttttccataaacaaaaataaaaatttcattacttaattttataatctcatcaatatattttcttcaaaagatgagatgacgtctacaaattaactaatgaaaaactcatcttaacttataaaaaagttcatttcattttttttttctaaaagtacttctagggaagtttatatcgaaatagaccctatttttcgtctttctttctctcccccaatatttttacgttgcctaacaaacccctggccctgttgttataggatgttatatttataacatttaatgatttctattaatttttgtagagtaagaacctccctacaatccctcccccaaatcacaagtatttgatgttagttgtaccttgtaacttaaaaacagtggtttggaaagtaaacttttcagcaaatcttttgtcaaaccttctctttttagtctttttttaacctattttttctatttgtaaaaattaaaaataatatcaaataatttataataattcatgtatcttaatcaattgaattaaactttttatcctttaaatctttcaatagacatagacatatgcagtaaccttttttaggatgaatatatattttttaattaaaagtaacttctaataaacaataaaatcaacttcctcataattagagttgttaaaaggagtctgcctctatgatgcaaatttgtacgcgggggcggagatcaacaaagaaaagaatctttatactgctagaagtatttttattttaaaagataattatattacaattttttatcttcaaaagttactcggaataacttctggagataattagaaattcattttcttgatttgttttttttaaagaacttgaacaaacagttacgcactccaaaacttttagaaaagactattcaaaacaataaaagtaatttttcagaaaaatattcaattgcatcttgtgaaacgagaattcttgtgaggttcaaatattttccaagaggaagagaaaagctaacaacatattttaacggttaaaatatttcacaaattttaactgttttatttaataaacaaatgctttaaaaattgtatattagagactggattggtaaggctccctctaagagggaatggtatttttttaaactaaataaacatttaacataattacatactttagatatatacataaatttttaattaaactgaaataatatatgtaagttgattcaggaatttgatgaataagaagactctttttgttccgttagaaaaaagtgatgctctaaaaagttgagaatgaaaaggcacactttccatagtgacggcaagaaaaacgaatttctcaaggtcccctattgtccttgggcggtggattgtccccataatgcagtttcatcatactcgctttttcgattttccttagaagtcaccacaccattactcccctttaagaaaaaaaaaaaccccaacctatgtccccaaccttacgctacaaaaaccttccacacactccaccactctcgtgatttcattgcataatccattgactagaaataccatattttaaccccacattaactcacccaacccctctttcaaaaaggcctcaaggagacactccggacttcaagttcgctatatcgttaagatcaccgcatccgagatattcaaaacttgtagcgaaaaatatggagggaaaagaagaggacgtgagagttggagccaacaggtacggagagaggcagccgatagggaccgctgctcaggctaaagactacagagagccaccgtcggcgcctctcttcgagcccggcgagttgtcatcatggtctttctatagggctggcatagcagagtttgtggccactttcttgttcctctacatcacagtgctgactgtgatgggtgtgaacaaatctaatagcaagtgttccactgtgggtatccaaggcattgcttgggcttttgggggcatgatatttgcccttgtttattccactgctggaatctcaggtaaaattcacagattagtttatgttttaatttatttttttttacatgtaacatcttcctgttaatcattttagtattttataaataatatatatatatatatatttaacatcttaaaaaaaatcatgtttctttgttaaaaaataaaagatagaattaggcttttttaaagtaagtaatattgttgattcttctaaaaaaagatttaaatatctttttaatttttataatttaattttttaatttttggtccttataaatattactttttatttttaattcttataagttatatttgttttatttttatattaattttaaatagttcctttttcaaggaataaaaataaaataaacataatttgtaaagattaaaaattaaaaaaatataatgcaaaaaataaaaatattaaattacaaagactaaaagatatttaaaaaaaaagtaatgttgatagttaagataatggttgacattataacatatatattgataattgattttcttgtcaataaataacaaaggctatttatttcattctgaaaactggattctgcccagtacagaggaaccaaatcagataaagatattgtactcaaattcttagtcaagggttcaatgaaatagccataggttttaacgagagttgtcgtgagtgtttctctctctacatgaagttatgtgaaattttcacattaaaaagtagtgaaaaaattctagtttatagtagacactcaagaaatcaattaacagcagtacagccttatactaaatgtggttggttacttaaatcacacaaagatgatactatttgactcgatgaaagattaaaaatttaagaatattatttattatgagatctcttcacaactttctctcatgtccttcttctttttacaagacaaattactaaattgcatgaaaaaaatatagttaatgaagttatctcccttattttttattttttattttttatttgcctaatgtagttgtgtgaattttctaatgcagggggtcatattaacccagcagtgacgtttgggctgttcttggcacgcaagctctctctgacaagggcaattttttacataatcatgcagtgcttgggagctatatgtggtgctggtgtagttaaggggttccagcctcacatctatgagaggtttggtggtggtgccaacataatcaataaagggtacaccaacagtgctggccttggagcagagattgttggcacatttgtgcttgtttacactgtcttctctgccactgatgccaaaagaaatgctagagactcccatgttccagtgagaaaaaaaaattcctaacacaaatgctaactagcgtcactttctttttaatactctttctaagattaggtgaaattaaaattaatgatttttaataaattttaatccatcaagaaagtgttagagaacgtcattaacattcatgattttattccgtattttattaaggtataataatttgtgttgtgacaatatgtctaatcataaaaatttgaatggatcagattttggcaccactgcctattggttttgctgtatttctcgtgcacttggctacaattcctgttacagggactggtatcaaccctgctagaagtctaggtgcagccattatcttcaacaaggacaaagcttgggatgaccatgtgagtcttcttcttccttaattttgtttagatttttctcttcatttactctcttttttcttctacttgtataataagcctgttttttctatagccacaacaataactcaataaattagtgacaaatttaatgataaaacattgttttttttcattaattctgggtcacaaattttagtgataaatcttctaaatattatacataaattgttttgttattaattttaattttagtttaatcatttgattcttatccttacacaatttttacattttagttcctaaatttaaaaactacttattttagattctacacatactttttaatccattttagttcctccaaacaaaattcattttaattcttgttatccaaaattgtgagaactaaaacacattaaaaatatatatgtacaagaacaaaaatcagttaaaaagtgtatatgtaggacttctaaatatatacacagatataaaaaacaaatgagtaattgaatctttgatttttttatttattttttgttagtaaggtctggtaggacagaatatactaattaattggctattgctaagagaaaaataaagttaaaatttctcaagttatattattgtgctgcagtggatattttgggttgggcctttcattggggcagcacttgcagctttgtaccatcagatagtgatcagggccatccccttcacgtcgaagtgatgcaacattgaagatgaattgaagcaataatgcctccaaaataaaagtagtaactagttgagtccaagacaggattcccacgtaaaagatgttcctatcacttctgctgatgatttactactactactattaatctatgtataattaatctattcaaatctcatgtatttggagacgcattagaacttgtggaaaccgtggtatgcatcgtttatttcttttttccccttctatttaacagcttctctgcacaaagcagaaactgcaggtctatatttgctagagtaaattgtataattatgttatgatgttgactaatcaaccctctatctattgtttggatttttttgtgataattcatgctcgtaagtccagcataatttagatggctccgttgaagcaaactaacaaaaatctgaatataattttgaatacaaattattttttaatattataatgaaatgaattatataatcgaattagaataaattcatgattggaatgttaagtctagagaaatgaaatattaacaactactaatttgatactgtgtacgtcagtgttaaaaaatggtgtccaccttttgttttttttctttttgggattgatattgacccaacataattgctattagtctcatctatattttaaaaaattaaaattattttttgccatagaatcatacttgttgtatgagtggaatgtaatacaataaaaatacgatttgattgcatagtataataaaaattgtactttcattgtgtacctttttttcacccccacaacaaacaaaacacaattgaatattaaaacagaggtggacagtggtgatgatagttgcttgtggaggttatgttttgggaaagaaggtgaggagaagaggaaaggataaaaaggtttttctcattattgtatgaggtaataacaataagattggatcaatactaattcccttttcttttttgtaggtgtaacatagacttgagattagtttgttggtaaatttatttaactacttataatttgttggaagtctctaaaatggaggataacatatcaaaggatttagagtttattttttaatcttgagactttcatatttaatttagagaagacaattatttacctccaaaacaattaaagaagaaacaagccactaaagatgccggaactcaaatctcaaacttaggagaaaaaaggaactattggagagggagaaggagaaatgagaaaatgagagggggaggaaaaagtttaagctttcgaagcttgacagatttattcatgcatccgtcttttaataatacacctttattttttttttattcccaaaatgactgtttggtaatttatacctccctatgtttatacctatgaatgctcaaccctcactttattccatcttcatttgcctaaaagagctacattgaagtgtctaatactttttatcccaaaaccccatgttttttttggcttacacaccttttcccaactcacccaacttattcttccctcatcctcgttagatcccatagggaatctctttgtaacctcttaaattttttttaccacacccaaaggaattttgaagagaaacatgtaaaataatgggagagaaaatactaccaaatttattaagaactcttcctcccatagacaatgatctgtgcttccatgaactcaatcttttcttcactttatcaacaattggcttccaagtctccttcctccttgggttagctccaatggggatgtcaaggtacacaaaagacaatttagtgatcattcaattcgtagtagtaatagatccctcccagatgtggtcttcaacaacaatagctccaaaaaactcttctgcaaatttactttaaaactcgagataagttcaaaacttctcaacatactcttaattgtgagtacattcgaaagagatgcttccccaaagaagagagtattatcgacatattggagaagattgacttgagtgtttgacttgtctaccaagaagctagaaaaaaattattctcaatagcttgcctcatcatgccacaaaggccttctaccactatattaaacaagaagggagatagaaggtctccttgtctaagacttctttgtgctttgaattacaaagtaggactctttttcaccaacaccaaaatggaggtagatgtcaaacaaaatcttatccatcccacccatttatctccaaaccttaatctaccaagcatgtaaaaaaggaaatctcaaattgtagaatcatataggttttttcataatcaactttgaaaaacaaacacttctttttctctcttttagcttcctcaatagccttattggccactaaggtgttatgtaaaatgcatctatcccttaaaaaggaactttgtctttggtctataaccccgttcatcaccctctacattctattggctaagagttttgctagaactttgtacatacatcccaccaaaaaaatgggtctaaactcactcaagttttgtgggtcttctaccttaggcacaagagttatgaaagaagcattagtacctctaggtagcattccatgagcatggaatttggaaatgaacctcaccatatcctccttcatagtctcccaaaaggtcttcaagaagttgaagtgtataccattcgacccgaggcatttttggctatcacactcccatatttccttcattatttcttgctctccaaattgggctattatcatttgattctcctcttccaaaatttgtttgaaacttgcatcatccaatcttggtctaggacaattcacctcactattttttttctcaaataaattctttacttctctcttcactccccgggtatctcctcctatcttccattaataatggatagccctctcaacgtatttttttcttctccacctcacaatggaatgaaaatattttgaattttgatctccctctttcacccacttacacctacatttttgctaagagattcattatatgtggccgcacaccaaaactcctcatacaatttcttttttccctccctctccaactcactcaaccccatatgttcctctttcacatgtaactcattcattttttgtatcacctattttttccttctttctaaatcaccaaagacattgttattccactccttcatgcattttttatacctttgatttttcttttagtacaaaagctccacacccattgacctctatctccttccactctttttgcaccatattatgaaaatctttttctttcaaacaacaatctaggaccctaaagggtttaggcccccaatcaaggtttgtatccttaaggaggattggacaatggttagaaatatctctatcaagaacttatagagaatttatttgccaaatgtcaagtcattccttagatactaaggctctatcaatcctacttctagtcgttccacttggtctaaaccaagtaagctttcttccaagcaaagcgacatcttccaactccatattgtctatgaagttattaaagcccatcttttcccttcttccaagctcaataccaccaactccctctctctcacaagttctcctcacattattatagtcacctatcaaacaaccaattatttttctcactacttctcctatgcaccaccaactccttccaccccctaactttttttttctctttcacatgaggaataaatatttatgataaccacttcgcaattcttctccttacatactccctccatatgaacccctctccaaagaaagaatttgtcaaagaaaaggaatatggatcccatagacataataggccccccgaagctcctctacatggagaatatacccatcagacatcattagatccccaattggcatagtatagttctttaacaatctctccttttttcttctcttggatacacaacatttgcaccacttccttaaccacaacattcctaatatgtttccatttgattgtgttacccaatcctctaacattgtatgactcataaacagccttcatgtgttatccaatcctctatatgtgatttttccatcacagatagaattactagtattggaatgtttttgactttcttccttcttgctatttttcttcaaaatcctaccaagtgaggattgtttcaccttccccttccccatagctaactgtaacacttctttaggtttattatcattaacctgcccccttatgactcctttttcttcgttagattctactaaggcagtggactcaacaaattcatagtcttcacccactgagtgatattgtgaaatggtcttcataatctgaattgtgcataactcctttttctttctctagcagtccaccttttctttccacaatatttaacatgtttggcacaatagtgttgcctattaggccctgcatatccacttctaacctcctgtgtttgtcatcaccatccaccccttttcttgattaagccttgcttgtacttgggccatattctgctccttttagtttttctccccttttaagaatttgaattctctttgggaatcccgtcgacttggtccaaccttcaccgaaagagccattacacacaccttgactgaaagagtcgtgtactaggaaatctatttttggtaaggaaagaaataaacaacaaagggaaactttatcaacatagatgctagcacatcccgaccaactaattgaagaaggaagttaggtggtcacatccatatttgcatgaaaatgtttgtggttgaaccccactacactagagaatccacaacataattcttatctgattctttttaattgcaagaccttgtatgatatttttgtgtaatcagtgggtgcaaggaaaaccttggtatgcaaaggtggaacatcaaagagatgttagagagagactcaagggaactataaattataaaagggttatttttatttaaaaaaaaataaaagaggtatattattaaaacagggaggtacgaataacaattgccttgaagctttagggagttgtcagactttaaaaggttttggactttttcccatgataccattccatgcctctatctacacccccaagctacattactaaaccttgccaaaacgtccaagtctcttagagtcactaaaacatataggtctatgtcattttattagtttgctcatcaaacaacgtaaatttaaatttaaatttcacctctgatgttagtcaagcacttaacatacattatgaaaaattagtgttacaaattcaattaccattttcaaacttaaaaattaacataatttaaacattaaaaatataaattagcaaaattataaaataagaataaacattagtatttttaaaaataactaaaactatacatgctaataaaaaaattgacacaaactttagtttaataaacattaaattcaaatatgtcaataaaacataacaatttaatttccaatttttaattaataaaaaattaaccaataataaatatttaaattcaataactgtttagaaacttaatatatatatatatatatatatatatatataaaaggaaagcctttgacaccctcgactaaagttttctcaccaaggtgctcagtaaatttgggttctctgatatttttgtcatttagatccataaaattcttagatctgccagatttctcatctcagtcaatggaaacccaaatgggttttttccttgccttcatggagtccaacaaggagacccctattccctctgcttttctatattgcggaagtggctcttagtcatggcggacctatgtataagaaaagggggggggggcaagtctcccccccccttaaattttgacacgaattgactaaaataaccttattttaaattgatttcacaaaattacccatattctgctccactggacgtctgctgtctgctgtctgcacacctcaattctgctcttctactctcacgagaccacgcacgtttatgctattctgcaccttagttctcctcctcaactcctctgccactaactgtcggccaccacggaccgcccacctccagaccagagcctcttgtgccgctcgtcacctgaacctaactcgcgagcctccttcatttctggcatggcatcgttcttcatcgtcgtccgtcggggctgcagcggtgtcgcttttgggcctctacaccctatttgaattattgagtgcccatccttctttagaatctagatccgccactgctcttagtcatggtaacgttgctctcgttgattgctacattccgagccacaccatgtatgttgatgatgttatagtattctgcagaggagtagtaaaaaatgtcaaagaattgatggtgctttttgtggagtgtggagacacatctggacaaattattagtagaaagaaattcattttttctatcacggaagcatcaaccaaagacagattccacccatcactgatatcctggggttcctcccaaaattggctcccttcaactatcttagtgccccatcttcaaagggaaaccaagaagatgccacctttagaagattgtggacatgatcaagaaaaagttgtcctcctggaaagggaaacttctctccttgatgggaagggtccaactagtgaagtatgtacctttggcctactactctcatcaatgaaatggaggaacacgttagcaacttcatttggtctggtaatagtgaccaaaggaagcttattatactattggaaatcaatctgtaagcctctaaaggaaagaaggctatatgccttagatctttataggatattaaccatgcttccatcctttccctagcgtataagcttaggtctgcaaataatcagtgggcaaagctgttgagagcgcgtgtgctcaaagaagattacaagtacacatacataaaatcatccttatggtgagcataaaacatttatggaataatatcacttctaacacatgttgggtgctaggaaatggcagaagcattaagtcttggacccataattgattgtctcataccattgtggacgtactaaattttcctttcggacttcacaacaactagatttcatttctaacgggcagtggattgtgttggagctaaggggtttgagagagaaaagggtttagtgttgggttcttgaagtattacaccaagaggcatcagatgtggaatgcttaacagtattacctccagcttaggaaaaaccctaataatatagcaatctattgggctccagaccatatgggcccatataactatagaataacttattgagcttgtatgtgaacatattaatattttatatatatatatattaaatatattcaacaatctcctcctatgttcacaatacaacacaatccaataaggtagttagtgtaatgttcaaaaaaagatgaatcatccacatccaatccaagacaatcaactcggatcagtcaaatagtttcaataataaaatattaaactcaaacactatttgcaatcaaactatatgaatcatcattatcatgaatctattctaagatcaatataacaatatatataccaagagttttagattaaatctaaactcatccaaatctcaacatctcaaaatcagttcacaaccaacacatacataatagtcaagtataagtaggccagtcaaaatagtctaagacctcacaaatataagaattaagcataataatcataatgttcacaaaatagaaataacaaaatgtaagcctcaaataaatggactccaacataatgggcaacaataataggtgaactatcaagttccctacaactctaaatgatagattcatatatcaagctgggcatcctcttcaggatcccacttagtaagttctcctacatctttgtcatccccctgtagaatgccaaatatgaatttcatattatcatgaattcaatcatttgaataaactactaaaaatgtctagttctattaaaagaacttagcatcatatcatcaagcaaagaagaacatatatcaatgtcataaaacatcataatatcatgttcataagcatcaagttagtttcataaattatgaacaaggcctaaatagtttaagttataaagagccatcaacctaagtttatttgtaaaagagtaacagttgtctcgtttcacataataagaccaatagtcacatcacttacaataacctagtcttgtaatttcaagtttaaattaagaaaaagaccaataggcttcttatataatcaattgtttctatgtttcaatttggaatgtcacagttactaattccttaaagtcaaataatctagcatcaaatttggaatgagatcatttaaccaaaaggataggccaacctggtaggcaatgtatcatcaagtttggaatgacacaaacttcccagatattggattaaaatcatttcatcaagtttggaatgagataactcacccttttcaaaaatagttagcaaccacgatcatcgatgaaacatataaattgtgcttatcatttggccagcaaaggaagattcgataattcaaaacacacaattaaacgtaagaaaaatgataattaagacttgtctacatagtctttaaccccatttcccctactgttttgaatactcaaactttaggcaaaccttttgtgagagcatcagccatgttatccttcgatctcacatcgaccaaagtgataactccttgttctctcagataattcaacaatgcatgtatcagcctcacatgtcttctctttgaattaaagagagcattctttatgacttggactgctacttgattatcacaaaataaacttaaagaattaatctttagtttagtcaaaggaatatccataatcagatttttttatctactctgcctcttcaccagctgaggctaaaacaaaaacttctgattccattgatgacaacacaatacaagtctgtcttttggatttccaagtaacaacagctccacccagagtgaatacatatccactggtggatttactatttccaatttctgaacaccatgaggctggatcgcctgaaagccaacatcagggtcgagctggagcaatctatcactgatcgacttacacaatcgatcaccgagagagttacccaacaagtgatgatgagcttcagccagctgcagtcccacatccagtctcaggctgccattcagcctccggaggttgagtcatatcctcttggtgcccatgtcagcaccaagggaagctgtgtcgatccctcggccaatgacccagacacgggtgcatctgacaggcttgggttgtatgtggatgacaatcctccccgccttgttgcccttggcagagttcatgagggatcgacgactgtgcacagcgtccctcttgtcgctgatcaggtaaaggtgagtgttgaggaggttcgcgatgcagaggctcccgcccctgttcccactgacgaggttgtgttagttgggcaggcactcaacactttccttgtctggccgacacatcttgtacatacaattttgactcaggttttgttatttttccctaatgtcttctagtttatgaatgatttgtcacatttgaacttaacatgatcgctcacccttggttgttaactgtgtaggttaaagaagaacccaagggaccgacgaaaccagtacataagccggaacttgtttctgatcccttgtaccatttagcattgaccatccctgatcttttcctcagacccttccaggtgccatgggacccgcagatgttcggggtgcataatgacaacttcctgttgtacatcaagcatgaggatatttcggagatcatccatggtggtcaatgtctcaacatctccgttattcaattgtggatgttgtaagtcttttgcaattgactagcattacttggtgacttgttttatattgtaccataacttactttattttcactgcacaataggcatgtgaatcatttaagtctgcaatcggatcattccgatgtgtatggattcctcgagccacagtcgatacagagatctggccaatctcaattttagatcgaggactacatgaagaaatggatgcagacttcacagaaaaaattctaccttgcaccgtatttgaatgggtaagtataaatgacaatcacaatttaattaatgtatgcagtataataaccttgtttttgacaatgcagttcacattggcaactggtagttatatgtccgaaggctaatgtagtcatctggttctgttcgttgcataacaggcctgataactaccttaaaggaattattaacaggtagtttctaatttctaacacatttacgttatttctatatttgaaaggtaacttgtacactatgcatacatgtttgtcttaaacaatgctttgaagggagtggatgattgtccagcaaataaatcaaaggctacaactaaatggattgcgcttaaagtaagtcttttcataaatcatggtttaagtattgaattaatttttattaatatttacggtagttgccatttaactttgactgtgtttttcaacttagtgtaataagcaaacaggaaacactgagtgtgggtattttgtcatgcattggatgcagacaatagtccaaggaggcttcacagatagctaggaaatggtaattaattagttgtttaagtgaaaacaaattatttttgtttacttgtttttgtattgtacttattacatgttttcttatgtcatgcagtttttcaatgatcaaagaccattggaagccgacactttgaaggcgatcagactccaatgggcgaaattttttcttaaaattagagaagatgtattagtagattaggtggtttattggattttcaaaacaattgtatattaatgcttagtatattcctttatgtagattgacaataattacattggatttgttattggaatattataaattgtgaattggctggatctggatttttaaattttcaggttgaagaactggtaaaattaaaaaaacagaaaaaatattttaaaaaacattaaaataataacatcggttgtaacaaaaaccgatgttaacatataaatcaacatcggttttatttccatgaccgatgttgattatggataataacatcggttttcacaagaaaatcgatgttgttgtgacgaaacaacatccgttttggaaagaaaaccgatgttgttacattaaaaacaacatcaattttccttccaaaactaatgttgtttggtcaaaacaacaaaccgatgttattatccataatcaacatcaggtttaactgagaaccgatgttgtatggtaagttacatcggttttctaacgaaaaatgatgttgtagtattagctgttacattttatatttttttaattgttacagatccacatcggttttcaataaaacccgatgttgtcagaatttcttaacatcggttttgaaaaccgattttaacttccagactttcaacgttgcctgatacaacattggttcgaaaccgatgttgaaggtcaaaattaaccgatgttgaatgctatatttccagtagtgctaatctattttattttactccttgataatcttgttaatttttgcattgttctttaattttagtttttgttcttgcatgttttactttacgcataccaactgtttgacaaaatcccccttataattatcaatgatttgaagctagaaccatattgatcgtgtctctaagtcgacctaggttagctctatgctacagaattagcttagtaatattgtttttgatgcgtcccgacaaagcaaatatcagagagaaaatggtttagtgttgggtgcttcaagaattacaccaagagggatcagatgtgaaatactcaacagtattacctccaacttagggaaaatcctaattatatagcaaactattaaactccaatccatacggactcatataactatacaataacttattgagcttgtatgtgaaaatattaatatttaatatatatatatatatatattaaatatattcaagaggctgtactagattggatttatcagaaagcccttcttgtttcagttgagattaatagaaccattataccagctgacaacattgttgatcaagcagtttggagatatactgaatcagggacattgaacttaaagcaatcttatattttcttaaaaacccatgcacttaggttgccttgagccaaaagtatttggaggggttgtattctgttgaccaaaccattggtctttggcattgtttatgaaagaaggttcccactgatggcgttttgagtgccagaggttacccttcggtttccaggtgtgatttatgtcggtgttcttcagaatcgctagagcatattttccttcaatgccagtttgctttcaaaatttgggactggctagaagttaagctgcaaaaccatcttaataggaactcttttgtggatatccttgctttggtcaaactaaaatcctctccttagctgaaggatgtgcggccgccaaaggatcgccagggatagtgggctgcagaggcatttttagggattctcaagccaacatgaggggttgtttttccgttagtggtgtattagaaccactttttttttttttttttttttttgcagagttgttggctgcaatcacaacaattgacattgttattgacaaaggttggcaaaatttatggcttgagtgtgactcgtctttacttgtgtaagctttctagcatgatactttgataccttggaaattaagaaatagatgggaaaatgtagtagctgcatctaaaaatattggtttcattgttggtcatatctaccatgatggtaacaattgtgcatatatgtcagccttacatgatgctaaggtggttttcaatggtgggattctaccccaacttttgtttcttgattttttgtaacagggtctacccttttataggttcaaatagtccttgtatttgggtttggtgttgccccgtggcttttgtttcttcgtctcttatttaatggatttcaggttctacagttggtagtggagtgtagtggtgtcgacatagtttgaatggtttcactcttcttgccctagctttgccttaaaaaaaaaaagaaattttaataacagtcaagttgaaacataagaaaacaatttgaatagttttttcataaaaagtaaaaaataacttacaaaaataaataaattaaacataaatatatccaaaaaaattcctttttagtttcaaagctctaaaatatctatagcatattcaatgggttttctttggaaatatgaagggagtttttaggcgcatcatcattgctaccaactaaaaagcacaaattactcatcatttacacacaattaggtaggagtgttcaaaatggaaccaaattgatcgagcgtaaaattgaaatgacagaaaaatcgatggtcattggtttggtttgcaatttggcacacagaaactaaaccaaatattaaagtgtaccgtgattgttgcaattagtgttttgttgttagatatctaatttctaaattttcatgattggaagcaagtattatgaatattgttttactgttttttctttagttcactcgtcgtaacttggaagcaagtattatgtttcggttttacttttaagttaaatgatttattatttaagtttaatgattacttttaagtcaaatcattattattcaagcaatattcaacttgaaaataattattgttttactttaaactcaattgttgtccattatatcgttaattgttaaatttattattattcaagttttgtccaattaataacaagtttttaaagcatttttaacacttactagcagaattttcaaatcataaaaaccaaacccgaccaattcacaaaaaaatggttttgttccgtttgaattatataaatactttaaaccgaaccaaatcattccacacttaattttcttgtatggtttggactaattaattttaagttaaaactacaccataaacacccctagaattatgcatgcatgtatccaatttacatgaccaaattaaaagggactacttcaatctaggggattgttagcttcaacttcatctctagcttccaaaattcagcaaattagtaatcaccattaatgagattaattttcatgttttgggcttaattgtccaaccacaaattcagatgacaaagacacttagtcatgctgaagaccaactcaaatattatacatgcttgatttttgttcttcttatgtgatgcaagtatacatggcaacagggcgaagcaaggacgggtattgcgtttcccatccctacccccgattttaaaactcatcctcgatccctgtcggggttaaaaaaacatccccatccccgtccccattgggggtcgggtttcctcaccctgcccccgctatttgcttaaaatttaaaaaattagaaaaaacactttttttcacttgtcaccaacatgacaattggacaagcttctatttgtgcttgctagtttattgccatacttgttagttattacgactttctcatgccgagctgaaaaaagtaattcatcggttgtaagtcaatttctttacacacattgaatcctcaacatgcaatttagattaatcattgtcattctttatattaaatactaaatattttttaaaattataagcatcacataccataccataccatacacttgaaatatgagaaaaagattaatatttttcacaattctgtaatacaggctgattacaaatttactaagtgactaatttacaagaaagaatcttgctaacatgattacaggaaataaaatagaaactaattacaggaaaacaaatctgtacaaataaaagcagaaacagggaaattaaaaggctaaaattaacagatgatataacatataagtttcaaataccactttggttactttcttgcctgttatttctattggcatagaaaatagattataaatcatggaatatggaatcctgtttcccaggacagagagctctacgataagtggaattaaaacatctcaataggctgtttaacatcggcttcacttcatatataatcagaaacatgacaaatctgttgataacactagcatatcaaacctagtagaagataaacaagcttttgataataataataataataataaaaaaaaaaacacgtttgtcttcttcctagaagttaaaggaagaaaacatatagtgacattaagctatatttgttgacatttgacattatcccatcgacactatctaagcttacctcctcacatgctaaaatgtcttgtactaaaaaaatttaatttaatatgtttggtttatcttatttttaaaacataattaattatctctaccagtatcttacaattttttttaaattaagcaattatttgttaaatccccaaaacctgtcactttgcaacaacaaagtagaaacttaaggcatgcttggcatagacttacaatgatagtgggaaagtggaaagtaaaaagaaaaataagttagaaatgcatatagatataattagtatttacctcctctcattttccagttttacattttcactgttaattaaagttatcaaataggacttgtgaaaaccaaacagcttgctctcttagcccagccaagaatttattagaaaggtgcctggattgggcaaatatacccccatcgaagcacttctggtcctaaaaaacataagaatggctataccaaaaactaatttgtttccccaccaggcttcacagagggatgccttaaacagaatattacaatttgcaaacaaaaatagactcctggaaggcttaaaagagaaaatgttggcatacatgcaattgaagtttaagactgcagagttacagcaaaaagtgctacaagacctacctaaaacaataagatccaatattgctcggcatctttcccaaaacatagtttccaacaacccacaactaagatgcttagataaaatgtgttttcttgttaaatatgtagaacatagtatttgaagagtgaagataaccaaaagctttgaacataagctgtgaaacttctcaaataacatgttatccttatctagaaactgctaacttaagaattaaatttactttctaattccaggtaacatgcaaacaaacccagatatatagaagctgtttcgatcaatatattaaatcagtagctccaaaatgaactaaatagaagctgacaagctgtttcgagtattgaaacctttgggacctaatgaaaattaactcactaggggtttcagaagcttgggccatcttcaagctcagggtttttctggaaatgcaaagttcttgcaaaggtactaaattaaatacataatacatgatacggggctttgccatatgaaattactcaaattagaaccccatatctgagaaacatagagagataattcaaagaatcacaaaattgcattaggattcagatctaagtgcttacaacttacaaggataccaaactacaacacagtttcgtggtacgtgaagctgcgaggtcgagaacgagcagtggtacgtgacggcggcgcgtgagtgagtggtgtgggagagaagctacgaggtcatgagaaatgagaattgagagtcagagaagtgagaactgagaagtgagcgtgcgggttagagtttctgtttcctttatatatataaggatatttttataatttaatatgcggatggagccccaaatttataatgcggaaaaaacttgaacttcaattccaactcgataaacttaatttttccaaaaaggatgacggattgggataagtagccacaagtgcgggcaccatgccatacaagtcctagttggactacaagagcccccgaattagtggcgagacggccatttatgaggcccaacatgaggtttcctcttatgcattggtacatttcctttcggctatttggttgagataaaatgttaggaacggtactagaaatagtggtttatttagggtctaatggttacgatgaatcatgttttgtaccaaaaagaaaatcgctggattttgtttgtgtttatcacttgccacttggttatggttggctcaaaagtcataagagatatatatacttgatttttttttatttggaattcgatggcaattccattaaaataaaaatctatttaatgagataaaggtatataattatagtaattaattacagattaatgaaatatattttagggttacataaatttatatatatatatattaatgattagtttttcaatcaatgaggtctttctttcttaggagaataaatggagtcaaatccttaataaatatgaactccttatataataaggacaactctatttaaataactttcgcaatttttttaaaatttattactaaactaaattatttttttactctaactaaacaactaaaaaatatttttaaaatacatttcacaatttatcttacacttttatattttagcaggcacatatgtatagagatatgataaaaatttaaccaaaggattgatgtaataatgtataatccttgttgtgttcaaatttttttgagccatttgtactcacacacagcgagtgagattaatttttaatctaatgggttaaaggatactcggagtctcccatgcagcacaacaaaaaaaaaatttaagtacatcctatctcaaatccattttccgatattttttatattttgggaaatctagggtattttcttgacaaaatccaaattgattattcctttgaggtgttaaaattcatttaaaatattgaccgcttttaacaaatagtagtaatttttaaacctgaaaatcaaactcctaactatgttctttagaaataaaattatctacttaatttatattaggaattaattcttatatgcatgtgtatcagtataaaaaatgaaattaaaattaatttagtcatgaactatttatttgtctaacaggtcactcctcatatgagcttaattaaacaatttctcaaaatttgagtattcatgcttcattataatatttttttataaaaaaaaataatactgtattatatgtgctttcccttaccctaagcaagccctacaaaatcttattttcacattcaaagtctattgtactaacccaatctaaaatcaagaccctagaatgatgtactaataccataagtttcttgattaatatggttaatttggattcaagatctttctctgtttctcccttgagcgaatttgggagatgatttttggagatacataatacatatataaaaataaagagagagggagagagatatccagagagagggttagttacttgaagatattctcaagcaagcaatgaacatatgcttttaagggttcctgagaaaatcataattattgtagacttgttcgatggtgtattcctatttcctaaccgcagcaacaaaacttgcagctagcattttcaatatgattttttttattttgttcattcattccatttatatatttttttcatttgtttgtttctattttgttgaattcattgtcactgcgcattgcaatgttgtcaagttaacgatttcttgtggacaagagagaaacaaaggaggatcgagaagagtttgttgacattgataactaactgttagaaacttttagaggaagtaattaagaaatctatttttttatcatattaatgaaatatactgaataaattaaagtacaacatggaaaaatagggttagagagtaaatgtgttctaatcggatattagtcttttaatttgactttgacacatgaatcacataaataaattaccagcttagttagcttaaaatgcaatcattaattaattaaatcaagtttgtgcttcttgactatattcggctttaagccacactatacgtgctaggttttgagccatgagacccacgttgggagactcatgcgtcaagaagatagtaatttttcctgctctatacacgaaaggtttatgaaaatgatacgcaacttttttagttgtttgttgttcactccaaaccacggttagaggaaggaagaataattttgttacgtgctttggcaagtcaaaacatcccatttatttgtagtgttttaaaagcgaaaacggacgtagtaatggttgatatggataacaaaggagcattttattttaaaagaaactagcatattaaattttccaggtgcatttcacttattatttatgaaagaatgtgattttaaataattaatatataccaaattttatttttaaccattttttttttgttacaagctggaggtgcaaagtattatgcctactttgctaatgacattttttttataagaaaacttgaatgatcacttttggtagagtataagatcctaattatgttttttcattcacaaaatttaaattctaaatcaatgttatgtgatttgggttggattggttaggtcgacccattgacttaagaatagattagttaagcgtatgcctttattggttctcaataatcaaattctttattccatcttgaatcctaaataggatctctataatgttcctctatgtatctttggatgtatgcgttttgtccatgatcttacttcagttaaaaataaactctatgccaagtctctaaaatgtacttttctaggtcactcatgttgaatccacatccctaattttaattatgacaaaccattaataatacaaattgaaagaatgatgggtttaagtgtttactaacattctacttaagtgtttattacttcaagaagaaaacatgttcattcattctaaagtgctcaaaaagagaacaactatcaaagttgagagctcataagaattcatgaaacccgtcataatgatgaagttgcttccctttcaatacttggttcttggcaagatattgaacaacaaggccttacatagaagacttatcaaagattacatgaagtgtttgttttatgatgataaccctagatagaccacgtcatatcttgagttacatttgtcggtttgaggtattttttgtgtcgttggaaagcttgttgaaaaagatacaattcactcatcaccttagaaaccaaaatcagcttctatcttatagagaataagctccaaagtaggtcacatgatcatgaaaaaagatttaagtcccacattggacaaaataaccatatgaaccattttcttcccctatacatagaggagaccaataagccttatatgcaccaaagagttaagtgggcttagagttagaagtagagtcccttagttgatatttttatatttccctttgagttttcaaactcgagaaatttaaacggtttgagattgtgtttgttatgaagattgtggtggacgaagtcattgggtcaatgcattattgggagtggtcacaagatcttcttccttttcttgaggaattgcttcatttaacattttatttgttatattagtgttgcttgtgttgattgattgattactaagagggctttttgcttgcagaatttgtgtaataatctaattagctagattgcaaaatggaggaagatgctagtgctctgaccccaccagtagaaattgagggagtaggaatgaaccatttcaacctgaagcacaagatgatctgcttgaatatgtaaatgaggtaggtggaaaaacaaacaaaatcaaacctactagacctacttctggagttctggttgttgggctcattttaatagggaagggggtgtttctatatggaagcattgtggccaaggttacactactacaaaaggcttattccacgacatgcgatctacgtcggttgttaaaaaatcgattttgaatgctgaccggtggcaattttgtaatttttggaagaggactacaaaaacaacgtcggttctcagtgtaaccgtcgttgtttaccatcatacaaagtcggttatataataaccgtcttagtattgcattattcaaagtcggttttgataagaaccgactttgattctttttaaaaattttgccccacccctttaaaatttcaatctcccactcctgccgccgtcccatatactccccttcgttccctccctttttctctatgccattctctcccactcctcctccaccatcgacttccacaccttcgaccccatctccgccacttggctccccctccctcgccaccctcccctccaccacctcctcctccgccgccaccctccttcctctcccgcagcctctctgtccagtccgtctccgccgccaaccgcctcgtcctccttgccgccaccaccgacaacctctccacggccctcccccacccccttatcttccaccccctcaccaaaacctggtccttcggccccaccctctccaccccgcgccgctggtgagcccttggctccctgggccccaccgtctacgttgccagcgacatcggctcctacttctccatccacgtcgcacgctccctccagaaatggaacctccagaaccctaacgccgtctgggaattgaaaacggagctcaaggacggcaggatcagcagagaagccatcgacgccgttgatcggttagattctaatcctaaatcacatatttaagatctaaattaaatagctcttggacttaattacttggtgatttttgttttcttaaatcttttgaaggaaagtgaaaaaggggatatttgttcttatgcatgtgacttcagtgagtgtacttagattatggttaccatcttgtgtgtgtgtgtctgtgtatgtggagataaggtttgagaattttcaattgtggatggattttcagttgtttcttctcaatcttgtaatggaaaaatttgcaccactaactatgaacttaggcactaagtccacttgcaacttctgccacactttttgtgaatacaggtcttgaatatatcgctcctttggttccgcttctatctgatctttctacttctgtccaagtaagtatcatatttacaatgttcctaagtcttgtatttaagttaaactgagtacttgctggctttcttttcttgagcagtgtagaaaggaaactaccaatcaatcatgctaaaggattgaaatctaaactgtggaatctgagggttaaaaaatcaatttacatttataatttaaggttaatatgtgcaagctattctgatgataataaatcctattctcatacctgttcctgtattgattcaagattatgtttgaacttgaattgttcagggattaggctttttgccaacaagattaataagtccatagtggctccactgccaacaaaatattctagttcgttgtaagtttatagtatttcatcaaatagttaattaacattgccatttacaaattgtattgtcatgttttatgctggaagtttattgtctttcatcatatagtgcctgaagttttccaaacttatcaggtataggttagccaaagatgatttaaagtaggaattcttattaatttatagtgatcaattattaatattgtttactatatgattgatgattgatctagtcattttgttatcttatcgcttttggaagttgtggtcttgttaaaagtatgctgcggaataatctagagctgaggcccagtgtatgtacaattctcctctgacctagaataattcaataaactatatttttggaacatgttgcttcatattttattttcttgatgaatggtgccagtgtctacatgacagtaatgattcttcttagtgacatggattcattttgtataatgatttgtctagcttctcaaatgtcttattctgtgtgcgatttctttagtggttacttgcaaagaacttaatcttttggtattattcaatctggacctttggggttgtcatccctttaagtggccatcagctcactcgtcaaagaagggctgcacgaagatgctttcaagacttttgatgagatgaggaattgtggagttgttcctgaggagttaacttatagtctgcttataaacttaaatgctaaaagtggcaacagagatgaagtgcaaagactgtatgaggacatgaggtttcgaggaataattcctagtaattacacttgtgcttcacttctatctttgtattacaaatatgaggactaccctagagccctctcctttttttcagaaatggtatgtaataaaatttctgctaatgaagtcatatatggtttgcttataagaatttatggaaagcttggtttatacgaggatgctcacaaaacatttgaagagacaaagaaccgagggcagctcaccagtgagaaaacatatttggcaatggcacaagtccatcttacttcaagaaatgtagacaaggccttggaagttattgaactcatgaagtctagcaatctatggttctctcgattttcttatattgtgctgctgcagtgttatgtgatgaaagaagatgtagcatctgctgaaggaacatttctagctctctccaagacaggaccacctgatgctggttcctgtaatgatatgctcagtctgtacatgggacttaatttgatgaataaggccaaggagttcattgtccaaataagggagaacgagacaaattttgacaaggagctttatagaacagttatgaaggtttattctaaggagggaatgttgctggaacctgagcagttgacaaatcagatggttaagactgaaaattttaaaaatgacaaattcttcatgacattttattggattctttgtgaacataaggaggatacgcaatctgatgatgaacttgtggccattgagcccattgacaaatttaacgctacagctcttggtttgatgctcagtttatatctgacaaatggcaacttcagcaagacaaaaatattactgaagctgttattaggttatgctgctgggggatcaaaaattgttagtcagctcatcattaacttgtctaaagaaggtatccctctactataaaattgatcataccatatcttttgaaatttccattttcaacataattttttcttttttcaggagaaatcagtaaaacagaattgcttaaccatcaactaattaagcttggctgcagaatggaagaagccactgtagcttctctaattagccattatggcaaacaacaaatgctgaaacaatagaggtatagccctggaaaagtaaagtaaactagagtctgatactctgatccatgtatcaacctgacatatgccagacaataattgttgtcttccactacacaatctataacttgtttgtttggaaagtgctgtacatactgtagtggttttgcatgggtgagttttgaaaaggaaaaaaacattgatcccctgtcttgttaaatttaaaagttttaattgtaaaatatttaattgattatgtcgtgctattcctacagtaattcaattgtttcaaaagtttaaggggatgctggcctcctattgcatttagtgaatgggaatgatattcattttctaagatgtctattttgataacatagaattgtggaaaatcatgtaaatctgtcagtttcagaaaatgtggaagtggcaggagtatcatttattccttgttgcttcacttttcagcatgtagatatttagcatttggtagataattaaatagaatgttttagacaaatgcatgaatcttgctaagctatgtcactttgtctacttattgcagggcctctttaactcaattgcttatggtctcaattcttctgttcgtagagcaatttctgaaagaatggacaagtaagtgttgattccattcatctgaatagattccagttgattttttttatctctactttggtcccttgagtttcaaggtcagtctaattgtttgaaaaattatggtcaagtctatggcacggtgcacgcacatgtgctgcacctgttcagcacataatgctcaccattgggtagctattgtctatctggctgtgaatgattaggaggtctgtaacctgcagtggccattttcaaaacatatttggtgataccatcacaactttatcgatttattagagccatttacttatattctcagggccaagtcatgatatattcaccattcatactttggaatcaatcagcctcagtcttttctaaattgatttaattatttgaggcttgttttgtttaaccattgattttgaatgtgttgaggacctatatatgaaattttctttttgaaaagtttaacataaacctgactttgtagggctgtgggttatcaactttaattgtcgttgatcatgttcttctagttttgtgaagttgcatcagtaattacatgacttccttctgttatctgtttccttgccttattgaggctcagttaagtcttttgataagattttggaagaacaacatcacaaaagctagccattatagttggagaatccaacaccttataaaaatctaacaccaaaattccatactttcagtgggaactcttgactcctttataacttagacatggtgaaatgttctaattctggttgtctgtgttggtttgactatttcatgtaggctatgagattttgtggttcatgaagaaggtatttgctgtctggtgaggtttgcgtgacagtcattcgttgaattggaccttacttttaaagtaggctacattcatcaattttcagcaagacatatttgctaggttagttaaatggtgcttacctttatctcactttcgcatgcttgtgctggtcctcttgtttatgtggttcgtgtttgaaatccactaaagaaggactgttgatgggccattagccaaggactggagacgtgaaacagcttcttcatttaacatcattcgtagcatcactgcaactgcttagcttcttaatttagttatgttctttaatttgttgctgttgaacaccaaatttttattttaatcaacacttatttggttttaccgattccttggcacttttcttgcagcactaggatgtgttcagtttgtatctatcattgccttcgcttactttgtcttgaacaaaatggtgacagtaaagtatgctaaatttgaactgcgataactgtttcatttttgttttttttcaccaaatcttttattcctttgttaatacttgtagcttaattgattgccttttatcagggtactggttgccacagctttcattgttcttgggaatgtttttctagttgcttttggcaatcaccaatcacctggtatgtaacattttgctcagttcaattaaatctttgcttttattcttccttgcaaaaactgtttttcttgattattgagagtgttaaatttcctgtttatgtattcttcctcaagcccttctcctttttagtactgtccccagaactagtccaccatataccatatggaaaccaattctagtttcttcatacattctctcaatctatatggcagccttattcatctcaaagtcgaagcttcaatccacagtacttgttcttgtcctaaacctatatttcttcttcctcttctgtctccttctaaaggtttattatctccacctttgtaaaggttgcagcattgaaagatgcttgtatgtctgtagcccctaataataagcaccataaaagttgtggtgattagtgctaccttcttacctcaccacactgttctgacacagaaattttcaaaggaagtcaacatctgtacagaaaaagttgcacaaaggtatgcctcaaacaaactcattacataaactaaaaaagaaaatgggaaaaaatatagggaacattcaagggtaatcaaccccaccagtccaccattctctctctctcttcaatgctgcaaccttatttggattttggaaaagcttagctaattaagaagcataatacaccctcttgaataagcattttggtatcttcagctaaaaatggagagtagctgcattctggcttttcttctcctcctcttcattatccacttaactacaacagaagcttccttcagtgttggtggtggagttggtgtagatgtaggtgttggtgttggtgttggcaatggaaacggtggcagtggtggagtggtttgggttggtggagggattaacagcccagagccacctagatcttcagtgccaaagcttgaaagagcttacacagcacttcaggcatggaaacctgcagtcactgaggaccctcttaagcttttatcaagttggattggtcctaatgtgtgtgctaacaaaggcgaaaatcaaaaaacatataccttttcaattttctgagacaatatgcaacattggtttaaaaaagatttagaattattcctaaaataaacccccatcaagaccagcctaatggagtgtttggataatttgtataaggttctaggttcaaatttcaatgtcatcattgtacacatacaagacagaaaaaataattattcctcaaaataagttttaatgtaacatacaacacattagaataacaaatgtaattaacatatacatcaatacttccaaaataaatacttgttcagtacaatcaccatccatctaaattactttatcaaataattaagggtcaaaccactttttatgcagtaaaccttaaagataaaaaaatctaaagtaacgtatcaccacttatgggaacaatttcaagaaaattgataaatttacacattatatagttgattatgtttcttatatatagagagagagagtagtagtgttaacaacacagtacacaacttatactaatggttaaattttattaaaaattacacaatcattgaatgagactttttaaataacatagcagagcctacaaaaatttgcaatttatcaatcaacccttcagtcaataataaaaacatgtccaaggagtccaaggagttggacctcgttatggttagttcacaggaattcttaatgcttacactcatttttaaatattcaaaacactggctgacattttagagcaaaattaattttgacaatgtcttacttatacctgcagacttgctagcggaatcgtccagaagagaaaaggaggcaaatatcaagcctgatccagatattgatgcctacatgaaggtaaaggaagatgactttttttggcaggatgtgttttccatatttgacttgcatcccttagccttttatattgttgaacaactggtagacttccaaaccagagacaatttcttaatatcagtagctatttggatttagagattccaatcttctacatcttgctatttatttcaaaaatactcgccagttcaagaaacttgtagtgaagtaaatataggtcataaattagttgtaatagcaaacaaagcagctacttctaatctcaattacatacagtggcatgcagttagttatattaaaatagtgggcatcatctatttatttgaggtctaacatattaagttgaacaagcaagatgcatccctttgataggcatcccatggacacttcaaggagcagtatttaatttcaatttcgctttgcatttagcacttaattcattttgtggctagtatcacaaattaccaaacttttttttcatttgactctaattcttgtcattagtagcattcttgaatactggttaaatagtacaaaagaaggaaatagctgaatttgattcattgggcattgcatgggcaaattcaaaaaaaaaatggcatttaaaaaaaaatgggaccatcaaagtcggttatttgaaggaaccgaccttgtatatatcaattctaagtcggttatttaaatgaactgactttgtattcatatattctaagtcggttatttaaaagaccgaccttgtagatgaacaaactaagtcagttcttttaaagaactgacttcgtatttaccctttctaagtcgatcattttaataaaccaaccttgtatcctaatatttgaagtcggtgttttaaaaaactgactttgttatcatactttctaagtcggttttttgtaataaccgactttgtatgggtactttctaagtcggttatttaaaataaccgacttagaatacgcgaaattaaaaaataaaaaaataaaaaaaaagaaatttaaagtcggttttttaaaaaccgactttgtagccttgggtatactacgacgtctaatacaaggtcggttacaaaatcgactttaaatggcctaaataaacgactttaaatcctcctgctgtagtagtgttataaatgcaaaagtaataaatctggaaccaacaacttgaacagagatgcaaaagaatgtgataagaatcctgataggaaagtagataagaagcaaaaacatattgtgcttggaaaacaaactgaatgtgatcatgatagccttctttcatttaagcttatggattttaaccaagaaaaaagactaggtatcagcttgcaaaaatggtaatcattgatgagcttgattttaagtttgttgaaaaccctgaatttagagaattttttactactgctcaaactagatttaaaattcttagtcgagtcactctagttaaggattgtatgcaaatttatgttgaagaaaaagtgaaattgcatcctttattgtcaatgaattatcaaatggtttcactcaccactgacacttgaacttctattcaaaacatgaattatatgtatgtgactgttaattacattaatgaagggtagaaaaatatgttacaaacaacacgtcatcaaaaacatatttataccacataaatcaagttccagcacacatttgccaagaaggcaatccctcttggatccaaatcacgtgtatcaattcaatacaaataattagcaatataaatagaattaaatcacaaatcaagtcaataattcataataaagtgcaggggtctccctctagggtagaaccactcgaccaatacttcacaacaattaaatataatttcgaataattaaattaagctaaaagccacatattcacaagtgctaaaatatgtaatccaaaagttattcatcatatcaaatcaactcagaatcttctagaaatttacagagaccataataattatacatataacatgaaaaaaaaatataacttcccattttactctccaaatgggatttttaaattattaagaactgttggcagattaaacaaggtctaggaattatcaaaaatagtaaaactctaagtaaagtgatctttcgaatcatgactttattcttaaatatgagatgaaatcttatatcttagattaaaaaactcaagtatcataccagttataaaatataaaagaattatatacatgcaattaatataaactttttcttgaggaaatcaatacaaacctaatgtgagtgagatgatcccaagcataaagtgaaaataacatttaaaaattagtttttatataaaaacagtggatctacactaaaatccgatgaaaaagatccgcaagaggttatataataataataataataataataataataataataataataataataataataataataataataataataataataataataataataaaaggaatggtaacaacacttcaaggtcacgtgtcccgaaaaaatatataggttatgtttgttttgaagaatgaaaataatatataagagaaattttatattttttttatgtaagactcatatattttatattttattttaatttaaaaaatatttctatcatctaaattaaatgcacccatagagtttttgagtatgactgcagtccaatgagataattaagttttatttttttagttggtgaattgaattacagagttgtcctatagttcaaaaactaaatgtacgaattgatacggaaattctataaaacaaatttatccgtcatttcctctagtaaaccctttgcccttttttaatttatcatttacccaacaaaatgttcagtgtttaaaataacctttttgattgtttgagaggacaaaatgttcgcacctatttcttaaagaattcgtattgcgtgtttttcatactatactataagtagaactccgtattgaatatttccacttctggtaaaggaatttataatcaataaaccctctacttgtaaagattctgaagaaagaaacactgtaataaatcaaagcattaaatcccaatgttaataaagtgacaaagcaccggtataagccaacaatggtgtgcttgaggagttacgctaataaagctatgtacaatttaacaagcaaattaaaaaacgtgaggaaaatgaaacaaattaacactttaatttaaaccgaagccgtggcttggttttattaggctgctaaggccggcgtcaataaactaaaaagtaggctctaattgaatgaaacgcagctgttagcatcgacttccaactacttaaagacccctcctaacaataactgccctaccacgcacgccaaaaacaacaccaaaaacaaaatcaacacactcacagagtcacagtcacacacttcgtcttaaccctctcttgctcatgtaattcacccaaccttctaaagtcatgaatatcttcacaaaagtccaattagtcatttttaagtacagcatattatttattatagggttaaatagtggttgtgaataagataataatgttcactttttaataatatttctcctcgtttataagtatgagtacgtgaatcaaaggtacagagctgagtgggtgttaacaattaatgtaattatgagaagttacgatatattcatttgattaattttcttaacatatcatttttcatacaaacaaacatgagaggatctaatacctaatcacaccatccttaataaaaaaattatctatctatcattcatgtcttgctatattaatatcgttcttagacaaaaaatgaaaaattatttcatctaagtcccgagaaaaaaaaaaaacacattgaatctttttattatatactaattacatatctttccaaaaattgttcaccaacatctcgacactcacccttaccctattaaagcccccctcagaccctctctctctctcttcataacatttccaatccatccaacatattctccagttagctcccccaacacacatcttcaccaccacaccacaccacaccacaaccctacctctctctctctctctctctgtcatggtcatgggaggagccttccctcgtttcgacccaatcaccaaatgcagcacccaagaccgctccaaccagaccatagcctcagacctcgatggcaccctcctcgtctcccggagcgccttcccctactacctcctcgtcgccctagaagccggcagcgtcctccgcgccctcctcctcttaatctccgtccccttcgtctacttcacgtacctcgtcctctccgaaaccctagccatcaaaaccctaatcttcataaccttcgcagggcttaaactaaaagacgtcgagctcgtgtcccgctcggtgctgccgaggttctacgccgaggacgtgcaccccgtctcgtggcgcgtgttcaacgcgttcggggggaggcggtgcattgtcacagcgagcccccgggtgatggtggagccgttcgcgaagacgtttctgggggcggatacggtgctcgggacagagctggcggtgacggcgtcggggagggttacggggctcgctaaggagcctggtgtgcttgttggtgttcacaagaaggatgtgatattgaaggagtttgggaccaacttacctgatttgggacttggagacagtgtaacggacatggatttcatgtcaatttgcaaggttggtataactgtaatattatgcatatattcctctctctctctctctctctctaaatcatttttatattttttttattcataataattgaaaacaaagtttacaatatttacatctcttactcaatcaataaaattacatcttctggtcattattaatttttttctttaacaatttaaaactaattaacctccatatattatacatgaacacggagttatttcgagtatacgataattcttctctctagcataaataaatagataattcttctctctacctttcccggagagaacgtgaacgcggagtacagctaattttaactgttttttttttaagcagctgtttaatatccatatatttgtatttaaaacttaagaataacaaaaatttaagaacagtattataaagtaatattatagttgtttttcaattaaattagagtttaatctttctaatttgtaaaataaaattgatacatatagtgaaacttgaattttaattaaagaagaatacaaaaaacagtacttgtgaatacatatatatatatatatatataaatatatatattataaagatataatatttaatgcaccttattaaatgtttttcattattgtaaggagaatgttcgttattagttcttagttggtgtattgagagtactgaatatgaattttttttttagacaatatactaattaaataagatttttttataaaataatatagcatttaatgttatgaatatatttttatcgtaatttctaataaataactttttcatttatgaatttttaatcaacattttaaatttttaacacactgcctagtaacacctttaaaattaaaatgcactgtaattttgaatattattaatgaatcacggttatcataataagattattggactttgcgataattatttaaaagttatattttgagtaatttttaattaattaatagtgcatcgaaattaatttgtaaacagtttgtgtgttttatataagaaatatgtatagacgttgttttcagttactcgctttcaactttatgtttagacgtgaggaagccaataagtaagctgcatgagctgtttctttgctaaaaacattatgattaattagattgtccccgaatcgcttcgtagttggtgagagtctttaatgatcatgacatagtttttcagctacatataaagtacctaaatgtgtttttttttttttttttgcttacatatattttctctagtggcataacaaaactcccactcaattttttagttctacccagcccgtctttttcgaaatttactttactatcctcgatcaacttttctagtggtcctcttttttcttctatggttccgtttctggatacgtcttgttacagcttgatcagtttcgagttggttatgtatctgctttttaagttctctttcacaactcatgattcgttactatttttttttttgttttgttttaaataccttaataactaaaagatccctaattggttatcttccaaggatggaccaaattcaatttagattggggacttctgacactttccataagttcctcatgtccaaccaatttttaacactcaatcaatgccgtactatttgtacctcatgtaaaatatatgaaaaatgttgtttttatctctctgcatagttttctaatcatcaataacaaagcacgattcttatgacatcccctgcagctgacttactctgtaaaactttattttcccttggctgtttttgttttttgttatatcacggattcatggactttttgttgatgagtgacacaaacagctatagcatgacattttataaggaaataaatatcattagattaaaataagactatcctaaatccattttgttatgatgttccacgtcaagtaaaccactccaatagaacatcattacccaccttccattaaggctttctggagctaaaacaattaacttttgtgaaatcattttcatgtgtttccttatccggtttgggatttggatcctttcttgtacatgatacggatttgtttgagagaaaaggacaaaaagaaaatatcattattgactgtagaaagtaggaaccactaataatacttctttctctcttctattctttatacaaaaccatatcgtcttactgaaaggtgctcattagataaacttttttataaacacttataaaaaaaaaaaaacaaaataaaaagcttaaaattaagtaaacttttccaaaaaaacttgaagtgcataacgaagaagtttaatttattttactttttattttctttttgtataagtttatagagaaatttattcaaataagatccaaatccaagcaaaaattaaatgaaattgtcactcatgctcatttttcccatgtatccaatctattcattaactgtgttttcccctacaggaaggatacatggtgccaaggatcaagtgtgagccactaccaagaaacaagcttctaagcccaataattttccatgagggccgtttagttcaaaggccaacacctctagtggcactcttgaccttcctatggatgccaattggcataatcctctccatcctaagggtctacctcaacatccctctgccagaaagacttgcttggtacaactacaagcttcttggaataagggtcattaggaagggtacccctccacccccagcaaagaagggccaaagtggagtcctatttgtatgcaaccacaggacagttttagaccctgtggttacagctgttgcattaggaaggaaaattagctgtgtcacatatagcataagcaaattcactgaaataatttcaccaatcaaagctgtggcactctctagggagagggacaaagatgctgccaacatcaagaagttgcttgaggaaggggatttggtgatttgccctgaaggcaccacttgtagagagcaattccttttgaggtttagtgccctctttgctgagctaaccgacagaattgtcccagtcgccatcaacaccaagcaaagcgtgttctacgggacatcggttcgcggccacaagctgttggatccttattttgtattcatgaatcccatgccaacttatgagatcactttcttgaaccagttgcctacagaactcacctgcaagggagggaaatccgcgattgacgttgcaaattatattcagagggttcttgcagggactctcgggtttgagtgcaccaatttgactaggaaggacaagtatgtcatccttgcaggaacagatggtactgttccatctaagaagattgcttgaaattggagagggacaaagtaaactaatcaatcaatcccttcttttgattctctctattggtctctcacgtgtgttttccaaagcgattagaattattagagtaacaaaaacggattgtgtttattgccccataaaaaataacagtttatgtatattgttattatgataaattcagattgtagtttatgttgtttggtcagtgctgaaattttctgttataccttttttttttttttttgcatagtggttgagtattttttttgctacaatgtatgatagttatgacaaatatagtactacagatggatgtttgtgatcataaggtaccagcaataaaggcattgctttggtgccttcaatttgcaggcaattatagatataaagctgacagtggtgtctatgcataaataaataactagtactagaaataatgaaatatacagaagaccagttaatatgatccatgtgttacagggaggcatgttgttcaactggccaagttgcatggaactatcagccgaggcaaaaaaagtcacccggattggcttgaaaataagacaaacaatcatagcatctccaaaagacacaagtaaagacttggatcagagagcagaaataacatagattaactgtgatttctatataaatatgattgagtttatgagtgaaacaaaaaagagaaatgattgtggttcaactactatgttctcaatcagttttcacaatatataccatgaaagtttatttctcatcaaccgataaactgatcaactatatattaagtggagattgattgagattatgatcgtgtgatttcaaatcatgtaataatttctagtgttgactctaattcagcttctatgatcatgagaaatcatttgatttgttttaatgaattgattaaggttaactaattgattgtcacaaaatatgttaaagttattttatatgagagattaaattacatccatgtaatttttgaccaattactatactatttaataatttttaattgaataatattttcttaaaatttatcgttggattcattttaaatagattatgtatacaaaatttcatatatccaaaattaattgtaaccacgttcatatagattaaaattgatttaatataattttttcaaaatatactaaaatattaatcatttgattactttcttattattattcaatttaaacaaaatttcacataaacaatcttgatatgtagacataattcaatgcttagattcataaaaattatattctatatcaaattataaaaatttaataattacttaagttatcctaatataattgaatctctcattaattatatatatatatatatatatatatataaatcttatgattaacaggttaaattacttattagaatcattaaattaaaataataataataataaagatgaagagttacataatttaatctctccctatatttgaaattagaggatattttcctatttaaccgtagttgcaatagactttatcagactaattagtcctaaaaaagttagtttgaataaaaacatatacactacaaaaattcattcaaaattcaatatgacagtgaaacaaacaatggctgtaagccaattactagctaaacctaacttagaggggtgctatttatgtatgagataaatgtttaattatatacaaacatgtggtccttcgattcattgaaactagagggtttgggaccatagggccgtttcctatatatgagattattcaatttgcacgtggaaatgtcagactataatctcagcaagtttacttcgtgtctggttcttgttttaggtacctttcagaagaaggattcaaaatttaggaaccatatgtttaatccttgtttgcctcacttggttgctgatacatgattaaccattcctatgttaatatctcacaggccacattggaggctaataaatggcattttttatagaatatactaattaaatatttttaacaatgtaaataagtcctcatcgttatattattaaaaaatatatcaataatagttgtgaacttgtgtcttttaattttgtatgcacttacgcaccgtcaccttaatgaaggttaatcaccacttctaataaggattacttcgtattaatactatgataaaaaaattattatttaaaatattgaattttgtaatattttgtttaaaaagtcatattcaaaagtattatttaattagttaatatttgatagtgctaatgtgcatataaaaattaaacttaagtaaattactccctaatcgcttaaactaaaagtgtattatagtacattaaagggcataaaactaatgtttcgttagaattcgggatggaataaagagaaacgaaataaaaagaaaaaaaaattataaaattaaaatgagaaattgagaaaaaaaattatgagttgtttggatggacagtagaaaattttctctccgcttatttgaatgagtagaaaataacagtgtaaagaaataaattaaataaatagaaaagtatttttatattatttaaaaatttaaattttattacatttttcagcataaattgtttattatttatttaaaaattatgttatacagaaatatttaagaaattaaagaaaaaaggagatatgaaattttactatattttttttccttaacataaatttatatttatttatttatttatgtaatgtattctttttaggaaatttatgtaattatttaattttaaaaaaatgaaaaacatttataggaactataaaaatagtgacactagttgtcgttgttttgcatactgctcatttccgttccatttaacaattgtaataagggaaaattatttctcctttttctttgcatgttaaccaaaccacctaaagtttttatctccatcctctagtactcttttctaattcattccttcccaaatcacctgaatcagacacaggataaaatgttatgtttaaataaaaaatataatacataaaattaagttaagacagttaatattcaaaaattagtttgataaaaagtttaacatattgaattgataacttatttataatcaaataaagactcgatctaacgattagtctttatttaattataaataagttatctattaaatatgttaaataaagcctctaacattgtcttctgaaatataatatttttatagtttttttttaaaaaattaataaatataaataattgtatttttttaaaataacctaaattatacattgacgttttaaccaaatagtaaagaatatcatgactaaagaagaaactatttttatttatcacttatttatatttaacctccaaaaaagaaaaacagagtttgctcttagacaaccaactgcacaaacaaggaacaacataaagaaggccaagctaatgccagaaaagagcactacaaatattatgacttcaatttccagaggagatgtcagtaaactaaatccgtaaggtttttttttttttttttttaaagttaaatgtgaccttttaagttattaacgtcatactctaaccaactaagctaatagactaattatattaaaaattaattaatattgatatatatatatcactaaatttatttaatttaaaataatttattatgttaaaaatatatgtatattaaatatacattaaaaaatttaatgttatatgtatcaatattaattattttttaacataattcagttattaatttatagtttaatttattgtttcttaatttaaaataatctattatgttaaattttataataacattatatgttaaaactatatgttgaattaatgtatatatatatctataaattatatgttaaattttagagatatgtatgcatgcattaattcaatatataattttaacatataatattattatataatttaacataataaattattttaaattaaaagtaataaattaaactataaattaataattcaattatgttaaaaaataattaatgttgatacatatagcactaattttttttatgtatatttaatacacatataattttaacataataaattattttaaattaaataaatttagtgatatatatatatatatgtatatattaatattaattaatttttaacataattgatctattaattcaaatgattagaatatagtaggtaaccagcagcccaatatgtgtggaggtataaagcacattttaatcagctgttgctatttacaccccctgtttcctacatacaccccctaccccctttctacatttcaactactcgttatacctttttttttccttgaagatgtacaccctttttgtttttagaaatgtatttccagaattacatatacgtattctgaaaatgtatctctgaaattatgatttatagttctaaaaatatgctttcagaataggtatatatttttcaataaaatatctcttaggaattaagatactcgactagaaatacatcacccacattgattgtatccaagtccctcctaaaaggaaacacatctacacacatcttaacagtccaacgaactgcacgtggatcttgctcattgtaatctgcccaaatctgatgggagccaatccgaggaaagtgttcaaacatccatgcctgtagcaacaataataactaacattttagttttaatagtccaaagaaatacacaattattgcatttacacaacaccaaattaaagttcttcacctgtaaaagggtcatttatgcacctttctacttagtgttatggacacatgcatcacccaatgctcatacaagaatgtcaaagcaaccacaccccatgcataatcaacatagcctgagaggtcacgaattatgtccaagaatgctatgtccacatatgcccactcttgtttgtaaaaattgtacaaccaaccaagtgtaatagaaaaacccttgcaggagcatctacaggaacctcctgaggcttattatcatcatcacctgcaagttcttgagcatctgcacgttgtgtacgtgcaagtgttgtttgtagttgtcgctttcgtgcaacactgccacctcttgtacatgccataactgcaaaaatattaaatagacaatgttataatttaaatagaaaaaaattaagaattaagccaaaagggaaaactagtcaatacaaccaaatccaaatatagctttgcaagtttatttgtaatcacagaaagtgaaaattgtgcaatacaataaagttacaataagataccttaaaagatatttaacacaacttattctagtatcttttataataaggtaattaatatgcacttagtgatcattgtgtatttgaaatcagtaagaaaaaaggacaagataataagaatttttttgtcggccaaaaatgatatgcattataaacaaaatggtacaagaagtaccaccagttacaaaataaaactagtcacatcatggttacttgttatttatgccaaaaacctagataaataatagataaccttgagaacagtatatgctagaagtcaaataactagaccagaccaatatagaaggccacaaacaatatcatcccccataagttaaaattacaattcctacagatttcccattaaatgacacaccaccataacattgattatgccatgaccgaagaaaccttacaacaatataactatagaaactattaagtatccatcaccaaaattcaactatatttttttggataaaccaaagggattattatattaattgttaacaaaggtgccgaaatttacaagtttggagcaaacaaaagtctacaattaataacatccaccttacaaaataccttaaagatatgattggactctttatcccaccactagtcatagaagaaattgataaccatatactccacatgctaaaatgccttaacatatgaccactcctagtatattgttacacgaatgattctggagccaacacaactttttttcaataagccaaatatatttataaaatagcatctgcacacaaggagtgatacagattacagagcaagagtcaaataaaaacagaaagataatgaacagctgcaacatgcggattaagccacacagggccagaaaagaaaagcagttgaccacatagaaaacaaaaacatccctacataatcctgagatagtattatataccttcccaacagcttacccttctatgaatacccccaaacaaatattccttgtactggtagccaatacactaccagcagcactacacatatggaacactgaagtcctacccccttacagcaaacaccactgcacacatacttcaaatataactaacacctcagtcaccgaaattcgttaagcatatgtaaagccatctattttttcatgaagaataaggaaataattagacacctcaaccaacacacaacttttaaccacctatctttctatgccatgttagacaccacaaaggaagaaattataaaatttcagagtgcagatgaaggaaaactcacgtttatgatggtggaaaattatgtttgctcacatacttgtccctgtgagtgagaggaaccaaggaacgtcgtcaacgaaactatggaaccaccgaaaataataggtgcgaaagaagagagcagaggatgaccctagatgagacgggaagaagagaaaaagggggctctaagggggtagagggttttacagaagaagagaaaaagggggttcaagggggtgtactttcttaagaaaaagggtataatggatatttaagaggtagaaagggggtgtgcggtgtaaattgcaagtgtgtatttttattggtaaaacttacgggttttgtgttgttgttcatttatccacacaactacagaaaaaagagaatagtattctcacccttctaattgcgaataacttctcaattactattttcactcctattcttttaaaatcccttttaaagacctacctatccctgccagcatttccgcagaccctcaccctcctcccgtccttctcttttggctgcctacttttggtccctctcctccatttttcttcacacccccacaaatgtttcatgtttttctttatcttttttaacattgaatttcattaaaattttgtgtaaatatatttcaatttaaattgttttaaaattatgatatatatatatatcacgttataaaatttatgtttttttagtttatgtgtttttgctagtttaagatggtgtattagattaggattttaaaagattattttaacataatctttttcattttaaatattatgtaaaaatattatgacttatcatatttctttaaaaaaaatttatgataatttagattttaatggatttatatcataagaatttaaaaaaattgaaatgactttatatattataagatttgaaaagattctgcgaattttaaaaacacattcaaaattacaagagttaataaaaaaataagaaataatgaggtttagataaaaaaaaagaagtaaaaccaatataattttttaaatcttttaatagttaaaatgattacaactttatgtcctcctatactaactctttttgcaataacattttctcattttcacttttggatttgaacaatatatttaaattgatacttagttttctatttttttattactaaaattatttcatgataaatccaatgacatttttaaatggggtagaagggagtggtgaggataaaaaatttgtaagagggttactgagttatatggatgacgaaattaagggtgacaatcatgaaaatatcgtgtcgaacaggttatagacatagtcaatataaggaaagcatgattagtcttagcacaaaagaaaaacattaatttagaaaacaaatggaaaagtgcaagaggggaggagcatatttgatattttcttattccaaaagaataggagaaacatatatggcacatatatcttgaagaatattaaagagagaatagagtatgtgtgatgagagaaaagaaagttcggtaacctataggaaaagaaagaaaagagtctagcaaaatctcaagagatttgagtgagattatttgatagaagttttatactaaaaagtctgactaaatccatcaaattcttattaaaaaaccatcaatcgaaatttgtgtattttttaataccaaaagactttttgtaagttataaaaaatattaattgaataccactagattttgttgtccgcattaaaaaatcttaaaagtcttaactgaatatcacaagacttatttataccatttaaaaatcctaattgaataccacaagattttttttattaaaaatatcttttgaaatcctaatccaatacactcccctaaattctggagtttattatatttgttaattttttattaatatgattttttagttaattttttttttgtatttttcttaatttgtatttttgttaatttaaattttaatgttttaaatggttcaactgatgcagaatcatgaccaacatatttgtcattagaatgaacaaattcgccatatattaagtctctcatgttaggtcctactacatctactaccagtgtagatggcactgagaatgatgatgacaatgctagagttgattaggttgtgggattgttcattgcactaggtgacattaagcacaaccattttactattgtgccaccactttcaatagttatattctcaaatatcccctttctaaattatgtacccaaataccccttttttaaggtgtgaattcggttaggggggcgcgaattcacactagggttttttaatattgcaataaattatagttaagaatttggttttcttaaaaccaaattcttaacatgtagtttttttaaaatattaaaaaaaataattagaataatatttttttttaattttttgtaataatttttttgttttatacatttgaaaacgttcattttgatttttagattgtgaaatatgacttagtgaactaattttaaaattttagtttaaatgttattcatggggatgacttgcgcactttttttaatgttgatgatgttttatggttcaaaaaatagttaagttcaatagctttcatgtaaatgaatctaatgatataaatttctcatcctgaattagtttaaaaaagcttgaaaaggagtatggaaatacaaaaaaaaaaaatcatgttttgcactttaatagtttcctaatgtttttttttttttgcatatttttgtttatgaatatgaggttattttgtatgaacaatgcattgtttgcactattttcatgatgatgaattaaatggtacaatttttttttcttcaagcaatttagaaaggttttaaaatcatgtatgaaaattataaaattagactttatacttaataaactccttttataatataattagctaattgtgagttaatatatcatattaaataataaaacttaatgtaaactggaattactactattattaaaaaggcatccaattgaacttaaatgatgattcataaaataaaacaagattatacataaaaagaatattatcatgaaattcctaaaacatacataagtaggaccatagaaaacaaacataaacgggaaaatcattgctcaaacacacttcataacatgttgcacgcacgaaatacataattcttaacaagaggtcaattcttcggaaacacatgtgtcacatattaacaaaatattgacatgcaatgcaaatttgtgaataccaaaattattggtaacctaaaatgctaaaacattaccttgacaacattgtgtattgtaatatccaaataacatttggagtgaggagaaaagggacaaaacacaaccgcctgtagagtatacaattcaattcaataaaaaaaataaactatatacgacatataaagtaagaaatcaacaacaagaataagaaatgtaccttttgtagaactaagacatagccaacaactatgtattggcgtaaatctttatcttctatgattgtccgctataaagtggcatcaatagtccctgaaggatcctaaaattaaaattctcatgaatgaatatcccaaaaatagcaatgtaattgttagagatcgaataaaacttgactactttgagtgtaactctcatgtcgccaaaaccattgggctcacaatgacaactattaaacatacacgataaaaaatataatcaatggaccctaacggtgtctcatggagtgtgtcattagcatttaccaatcctataattatatgaattcaataatcagttgaaggtttaggtgtattaaatacaataaatgtttaatggtagttgaccttatgatcgaacgaaatctaaagcgcataaccatggattcctgttagattcacattgggtttcttggtgagcacgcattatgaattcttgagttgggagtggctccctaaatcgttgattcatcatgaaagcttgtacgacccctatgggaccaagaataagtattgttgaactgaaggatcacaaatttgtgctagaaggatgaacaaagcatgagaggtctgagtcattgataacgactatcgaatcgctacaaaacaagtaaaactaagataattatgtaacataggattaacctaggtcgacttagagatactgtctaatttggtttctgacttaatccacttataaacaacaagggagtttattaaacagcttgcagacaatgaacaaaaattacagaaactcaaacaaaaattgaataaaaatgcagaaactaacagaattgataaaagatgttgtaaaacagattcaagaatatcaatccaattcaccaaaccaagcaatgcaaattatcatagttctcatataatgatcatattatgaaggttcattcaatatcattagaaacagttcaatcgaattaactcctaaatcaattgaaatcacaaaccagattgaaatatcatccaaacaatctatgattacaattcaaaattaggaaataaatctataacctaatttgttttcaatcctaaaaatattcataatcatgaaaatagtaaagaggattgaagaagaagatgaacattcacacaaaaattagaatactaaaccagaactcaaattcttctttcttggacaggatccttagattgaatgattgtttagccttccatgatcatcatcagtggaagagccacaaaatttgtgtgagaaaaatagaaaaacagagatgaaaggaaaaagaaatataaagaacaattaagaacaattgagagaaaagatttgaattctgaaaatttgcacaagaagctagaaattttgtttttgtctctgtgtgtctatgttagctacactaatatatatttatttaatagaattaagggatgaactctgattaggtccatctaaactaactaattatgctaattacatcaattaaaatccaaactcgcagcccaaactcaagtgtagaggttctgacatccaagcctattttcaccctcaaaacgacagaattggtaacaaaattgtagctcttttccttagctttcaacggaatactcatatgctccatttggagttttgtagaatcctataggtccagcgcaaggaagatagatcaattaagcacaaaatctgaaaataagcaacaattatcaattaagcccaattatttgcctaagacgaaaactgagttaaaaagagaaaataagaatccaagagaagtcaaataagctaataagaatagaaaaatactatactaaaaacgtttaattagtcatcaatgttaagaaactcccacgaattattgtccatgatgaatgagactttgggagaaaaataaatggtttgaagatgatgagataatgaagtttacatccatacattacccatatttatacaaataaatgattagagctttgaatggaagagataacacaattatgggtcgttggttgtcatcagtactatctcaaccactccttttctggcacaaaagacaaagctctacaggattcctgacaagtgaacaataaccccattatgtcaatgctttatcggccattgattgtcgtcggtattatctcgaccatcccttttctgtcaaaaagatgaagttgtgcaggattcttgatgggtgcatagtaaccttgttaacgtcaatatgtgttgggtcgttgattgttgttggttaatcctgatcgctctttttttggcacaaaagacaaagctgtgtaggattcctgatgagtgaatgtttgctttgtttaatccatttggtctgctttttgtttccgaaagctctcgcattccacggaatctatcaaaacatgaaatatgattaaattaatattcaggatttataattatggcattgatgctaagcttttcatcttatcaagacaattaggacaatttttttatagatttctcagtatgtctttagataaatgcctaaattataaccctattttgatgtatatatggcatttatcaactccccccaacctagaatcttgcttgtcctcaagcaatagtaattaataacatgttttgtaaagaatcatcttccaaaaattgatcagaattaaaatagtgaaccttgagaatttgaaacacttagatgaaattcacctatccaaaatgagattaagattaactcacatttcctttctaaagaataatcagaagaaacatgtgtttgatttaaacagaggaaaacctctcaaagtgtttaattctcacaggtgagtgtttattctcaattccatcactgataatttatagattgattttacaattcatttcctatcaaatcaaagttcataatcaacaaagatcatcaggacttttatggctaggcctttgggctagaaaagaaatcttggtttttctggatattcaaaaatacctttagaataggagagcaatttcaaggataatctaataagatcattatttcctattcttttcttccaggatatatttttgttttcatcaagctttgtacaacaattttcatacaaggaatttttttgtttcctttttcttttctttttcttttcttttcttttctttctttttctttttcacataataacatataaccacatttgagattctcttcccagaagaatttttcatcaacagatcatttcccctttttgctctcctaacctcaggtaaggtatggaattcctatcctaggtttgggttttgaacaaaaatatcactgtttggctcaaagaggttgcaaatgataaatcattaaattcatgtttgggatgactttttggctagtggctttaataatattaaaaagaaagacggcctaaatcatatccatgcaacatatgttttgacaattagaaattcatgcaaaattactataatttattatcagtgaggactctcaatataatctatgtggttgcacacactcactaggcttaaggtctattttcatatttaaatcaactcaatgtttcaaaagatattctttatctattgatgtgaagaaaatcttgccttcattttaataattggaaaatcaatcatttgtttttcattctcaaggtttcaaaaaaaacattttggttttctgatctaatatttaaaatcaagtttcaaaaaatagtatttgttgattcttttcaaaacacgtcattttacaagaaaatttatttcttttaagccccaaaaagatattgtgtttactataattataaacaaaagcaaaaattttggtgaaatttttcaaaaagacatgttactgatatctagttcccaaaaagatctgtcagtactaatagcatgtgaaatcgtcagtaacagtaacataataactaacgtaataaagacataaataacgcgaaattttcaaaaaactgaaaataaactaagtcacagtgctccggatgtccgatgtagatgctacaaatcatcctcctcatcagctccctcatcatggacagggtcagctgcagcctcctgatctgctccctggcctcctgcctcccccggaaaaatgggtctttccccaggccatgcgatatgagtgctaaactgctcctgggtgggccagtgaaatggggttggatcgcggctctgctgatggtggaagaagtcacaaaagctctgatgcatccacatttgacccctgtggtttgcagcctgttggtcttctatgtgttgcatccggagttccatacgatgtaggtgagcagaaatggactccagagatgtaggctgtggtggctggggtggatgctcctcctgtggaacctgtctggctaagcataatttctcaatgaacacccggttaattggcggtctgatagtctttgaaggttgtactgggactccataagatctgcataagccagtaatgagtgcagggaatcctagtgccctattcgccttctctgggtctgtaggatgtcggggcggctctatggtgacaaattgatagatggcgtccgagataagctgggcgatattgacagtgagctgggtcatacagctaaaaactagctgagattggacatgggtaggtcactgttatgatcgctgggaaggatgttgcttaaaagaaaagtcatccatatttgggtgagagtggtcatgttagtgtgtagtagtcttattctacttcctgttatacctcgtgcaaagtctgtgcctggtatgcatagtagatcgaccaattcttgttcatcaaatcccagatggatgcttcttcgtgcttggtattcacatagctgtccttcttccaagactaatggattccctaggaattgattgatagcattagtattatacggaatccattggccttgcacgaaggaccgcatatctctgactccctcctctaatggccatgcatttgcatagaattctagcactatctctggatcaaatttatgcatcgggtttgccacttgaccccatcttcttctgttcacctcagccatgaagtcaggatattcatcatcctttaactgaacttttctttccttgatgaaggaccaatttttgatggtttcgaaccgttgttggtgctctttggtcctgaatctgtgaggatcaaattcaatgttctctaatggggcggagcttgacccctctcctccatgtctagctcttttggaggaggtctttctaggtgccatctgcaaaagaatttcagaattgaaaaagcaaatggaaataatacaatttagcacatattgaagctttgtaaataatgttaccaatcagcatagatgactaaccttggatacttgaatgcacacaattatgattccatgttcaagctttttcactttacaattcaattaacatgttgcaattaggtgcttatgaatgtatatatataccttatcctatagtgttaagcattaggtatttgagatatattatgcatgttaattttcctagcaagcattcaatgagtgaattcatgcaacacattatggcaattgttttgaacaaaaatcattttgcaattagtcacaccattcatatttgtaacaatttgcaacaattcaatgagtagaaaaacaagactttttgtgctacaaatcattggatccaaggcagccataaaaatcaattgtgtgaagtcacaatggtcaagttttggcatttccattttcagcctttggggacttataaatcttggtctatctcattcaattccattcaatcatcctaaagctacaaacaattgtactttgccattttcaatgaattccaaagaaaaccttaaccttgcaagctaatcataacctgtgtgtttcaaatttcttatcaagcatttcaacacatcatattggcacaatttgaacagcttatgcattggtttatttcagcccatgggtatcacataaatttgcttttcaagtttcatgcaatataagtaaattgaacttttaagcctagcatgaagaatgtgaaacataattagcattttggttgctctaatacctatcctagaagcaaattcgtccatcaatatgtggtatatacatggttgttttcattgaggcatttccacaaacaccttgtatgcatgcttggtttttcatgaaattaaatggctttggtatgtgcttgaaccaaaaaattgtcaagaatgaagagagggaggaaattcagaccaaaaccaattacaaaaacatatcaatcacagaacaatttgcaacttagctatcctagggttcttgaattgtaaaaatgagaacaacacacaagaattcacacaatgcaacctattctaatttcttgaagcaaataagatttgaagtggacaaaggcacttaccttgatgttgattgaagaattggatgaaaatcaattggcttgggcgagttagagcaagggagaacagaggaaatggttaagaatgcataaatggagtgaatgggggtagaaattttgcaattttggcttttaggttcgtgctgcagacctccactcgcccaggcgagccagtttacctaggttcactcgcctgggcgagttaaccctttttttttttttttgaagaactaatttttaatagttttatgtcttatatttagttgctattttcttatactaaaattatttaagcaaaattaattaaaagaaatgacggaaatggtaaaagaaaagttagaaaatactaggttgcctcctaggagcgcttctttaacgtctacttagctggacgcgtttgtcatttatgcttcttgaaaatggaccacagtgatgagtctatcaacatcaccacctaggtaaggtttgagtctgccaccattgactgtccatgttcgatttgttgctggatcttcaagaattacagctccatgtgacattacttctttgataatgaatggtccagaccatttggatttcagcttccctggaaacaatcttaatcgagaattaaataacaatacctgttgtccaggttgaaaattctttttcaacagtttcttatcatgatagaatttaactttttgcttgtaaattttagaattttcataagctgacagtctcaattcttccaattcgtgcagttggagttttcttctttcacctgcagaagaagaatcaaaatttaaatacctgagtgcccagaaagctttgtgttccaattcaacaggtagatggcatgattttccgtagaacaactgaaaaggtgtgaggccagtgggagctttgtatgctgtcctataggcccacaatgcttcatctaacttttgggaccaatccttccttgattgagcaactgtcttttccaagattttcttgatttctctgtttgagacttcagcttgctcattggtctgagggtgataaggtgaggcgaccttgtgtctgacactgtaatgttgaagaactttctgtaattgagaattacagaaatgggatcctccatcactgatcaacactctgggggttccaaaccttgtgaaaagattcctcttcaagaagcgaataactgttttggaatctgcatgttgtgcagctactgcttcaacccatttggtcacataatccacagctaataggatatattcatttgaatatgaagctgggaatggaccaatgaaatcaatgccccaacaatcaaatgcctcaacctccagaatgttgtgtaaaggcatttcatttcttctggagattccacctgatctctggcaattgtcacatctctgcacatattcatgagcgtctttaaagagcgtaggccaatagaatcctgactggagaacctttgcagcagtcctttctccattgtagtggcccccataaggtgagctatgacagtgccacatgatgttccttgcctccccctgagttacgcaacgtctcaggagattgtctgctcctattttgaaaagataagggtcatcccatacatagtatatggcatctctgagaaatttcttcttctggtgccaattataatcttcagggatcgcaccaactgctttaaaattggccatatctgcaaaccatggcctttctgaaatgtggaagagtttttcatcaaggaattcttcttgaatttctggatcctatatggcaatttcatctacagttagcctcgacaaatgatcagctacatgattttcactccctttcttgtctttgatttctagatcaaattcttgtagaagtaaaacccaacgaattagtctaggtttagaatcagatttaactaacagatatttgattgcagcatgatcagtgtaaattactactttggatcctatcaagtatgatctaaatttttccaaggcatacacaatggcaagcaattctttctcagttgttgcataattaatttgtgcttcatttaaaaccttgcttgcataatgtatggcatggaaaactttgttctttctttgacccaaaacagctcccacagcataatcacttgcatcacacattaattcaaaatcaagtgaccaatcaggtgcaatgattatgggtgcagaaactaatttttgtttcaaagtattaaaagctgtcaagcatgaatcatcaaaattaaatggaacttctttatttaaaagattgctcaatggcttagcaatttttgaaaaatcctttataaaccgtctgtagaatccagcatgtcccagaaaacttctaatgcctttgacattagttggtggaggtagcttttcaatgacatccactttggctttgtccacttcaatgccctgcatagaaatcttgtggcctaaaacaataccttctgtcaccatgaagtgacatttttcccagttcaacacaagattggtttcaatacaacgcttcaaaacagtatcaagattagacagacataaatcaaaagaagtaccaaatactgaaaaatcatccatgaatacttcaatacttttctcaactaagtcagaaaaaatagcaagcatacacctttgaaaagtagcaggtgcattacaaagaccaaatggcattttcctataagcaaaaacaccaaagggacaggtaaatgctgttttctcttgatcttcaggatcaacagtgatttggttatatcctgaataaccatcaagaaaacaataatattgctgacctgcgagtctctctagcatctgatccataaatggtaatggaaaatgatccttccttgtggctttgttgagctttctataatcaatgcacatcctccaacccataacagtacgtgttgcaatcagctcatctttgtcatttttgatcacagtcatgccacctttcttgggtactacctgtacaggacttacccattgactatctgagattggatagatcattccagcttctaatagcttgactacttcttttctgacaacctctttcatggttggattgagtcttttagtcctgttccattaaaattctatgcatacaataagaaggactgatacctgttaaatctgacaatgtccaaccaatagctttttggttttcttttaaaactttcaccagtttctcttcctcttcctcagagagattagcatttataatgactggcttttcagaattccctgcaagaaatacatatgtaagatttgaaggtaatacctttaattccagcttctgttcttcttctggcttctctttctttaattcttcaaaaagagattgatggtaaggaatttctctacagacattcagttgatgaagatattctgcttcttccttatctttttcttcatcttgaattgtttctgtcaatgccttctccaaaccttccttcctgtgaaataatctttgagagtcagaaattacctcatcaagtacgtcgactctgaagcattctctcttgtcagtgggatgcttcattgcttcaaggacattgaactgcacttcatcttcttgcactcttacagtgagctttccttcatctacatcaattagtactttggcagttttcatgaaaggtctgccaagaatcagtggaacttcactgtcttcatccatgtccatgactacaaaatcaactgggaaaaataatttatcaactttaactaaaacatcttcaataattccatgaggatgcttgatggttctatctgctaactgcaaagtcatccttgtgggtctgatttctacttctccgatccttttgaccatggatagcggcatgaggttgatgcttgcacctaaatcaagaagagattttcctacagataaatttccaatagttacaggaattgtaaaactaccaggatctcttgatttttctggaattgtcttctgaatgattgcactgcatcttgcatccaactctatggtctcctcatcaatgtatcttttcttctttgtgagtaaatccttcatgaacttggcataggttggcatttgctccaacgcttctgaaaaaggaatgttaatttgtagttgtttaaaaatatcaagaaaacgtttatactgcctttcctttgcctttttggatggagtatgagggtatggcatattttggacaggtggtgggtttagaacagctttgcctttctctctctttttcttctcatcttcactctcaatttttctctcaattttttcattattttctccctcttctttttcattcacaatttcattatttttattttctacagtcccctcatttttcttttcttcctcctctttcctaccaactacagtaccccttcttgtaataatggctttacattgttctttagggttaacttgggtattggcggagaaagatccacttccttgctcaggcaattgctttgctaactgaccgacttgtacttctagattcttgatagaagcatcgatattcttttgatttgtgatagacatctgcataaattgagttagtgtgtcttccaattttgataatctatcaagctgagcttggttctgtgaatttctattagaaggacctgcataaggggggttagaagaacctacaaaaggagggttagttggaacattataagcattattattttgcctccaattataaggttgattagaacctggacctcctctgtaaccttgataattcccttggtaattttgttgaggtctgttttgattctacaagtaatgagcctcttcctcaggatggcagtcaccaggagctggacagtggccattttgatgttcaccaccacagaaatcacatcttgaaatttgttgaatttgatgagctgtatgtgatttttgtggtcctccatgttgtatttgctgcggtagttggcctatttgcttggttaatgcctccaattgttgagtcaataatttgttctgagctagaatggcattttgagtatctagctccaacacgcctttcttatgaattgaagatctgtcatgatgggattgatagtcactggctgctatggagtcaatgattgctgttgcttcttcagggctttttgacatcatcgtacctccagctgaggcatcaaggatcatttttgtttgaggtctcaaacgattgtaaaagatatgcaattgagcggcatcatcgaagttgtgatttggacatcttcgcaacaaggatttgaatctctcccatgtttcacagagaggttcatctgctccttgggagaaggtagcaatggcagatttagcattgataaatctggatggaggaaagaatctggctatgaacttttcctccacttcttcccacgagctcaagcttttgttgggttgagactggagccatgttttcgcctttcctgtcaaagaaaatggaaaagctctaaggtaaatagcttctgcgtcttcgtcagaagctcccatcgtgctgcacaattccatgaatgtggacaggtgtgtatatggatcctcatggtccatccctgcaaagggatgtgatccaatcaaactcagtaatgcaggcttcagctccacaaccttgttgttgaaaggagggacgactatgttgttgtaatgttttggtccttgctggtaagcatagtcaccaagagtcctccttggtggtggtctattttcttcttcccctcggtcagccatattttcacgaacaggtggtttttctgatgaaggaggatcaatagacgaagtttcccccgatgtctttctggcttctagtttctttttctttctattttagtaatttctggatcaaacaaaagattatctgcagaagacttacctcgcataaaggaaaaaggtcgaactagaatatcccgtgagcatcgaagttaaaaataaaataaaatttatacaaaaatcaaaactaaaggaaataacgaaaaatatgaaaaattctactaaactgaaaagttaaatctaaaagaactgagtaacaactcaattccccggcaacggcgccagaaacttgttaggaaaactctcggcaagcgtaccgatttatcgttgcaagttacaaaatttataagattcgtttccacagggaattggtttactcaattaatttaagtagaacttgatagtttaatagttatgtacaataatagtggacgaaattcattcaagtgttgattgaaatagaaattaacaaaagacggaaataataaacttagtatgacttgattatgaacaattacagaaaattgcagaaataaatagaacgagttttaatttaaagagaagcacaggattggagttcatcattcttaccccttagtattcaattaatattaccatgcataagttaattccttttattattgatgcacatgtaaaatcattctaaatcgattcctcgcaattggaaattctaagaatacttatcaaatatcgatccctcgcatataagataaatatcccagcgttacgtttatattcgcgtgtttaattgcaatctaaacggtacgccctattcgtagtgatcgtaacgtaaagaataaatttacccagttctagttttaagagtacttttcagttaaacttaaaaccttaattcatgaaactattgatcaagtagaatcaagcattaagcgcagaataaatctatcaaaaataaatagaagaactaatgcatgaataaatatcaaaagaaatagattagggtaagaagattacatccaatccgtgtgcgcgagatttagccgaccatggagtaagtctccttaaatgaacagatgaagaatatcatcgtcattctcgtctggcagaacttccgcactctttaatttctctcaccctcacttaaaccactcttaatacaaatttagaagaaaactaaggtttttatgagcaccttagaagcccaagagagagagaatgctaagaagagattacaaattccaaatgagggggtttggggtatttatagatgttctccaatcgacttcactcgcccaggcgagcctttttaggctaattcactcgcctgggcgagtagcctgcaagttgggctccctttttgctgttcacaactggcccaagttggccacttgacgtccactcgcccaggctagtgaaatacacatggaccactcgcccaggcgagttaaatgcaccagggaatttgattttgggcttctgggcctgaattgcttggtgcacctctcctgtttgctttgtttaatccatttggcctgctttttgtttccgaaagctctcgcattccacggaatctatcaaaacatgaaatatgattaaattaatattccggatttataattatggcattgatgctaagcttttcatcttatcaagacaattaggacaatttttttatagatttctcagtatgtctttagataaatgcctaaattataaccctattttgacgtatatatggcatttatcagtgaacaataacctcatttatgtcaatgcattatgggtcgttgattatcgtcaatgctatctgatcaccccttttctatcacaaaagatgaagttgtgcaggattcctgacgggtgaacaataaccttgtttacgtcaatgtgtgctaggtcattgattatcatcagtgttatcccgaccgctccttttctagcacaaaagacgaagttgtgcaagattcctaacaggtgaatagtaaccttgtttacatcaatgcgttttgggtcattgattatcatcgatgctgatattgctttgtcaagatgcatcaaaaacaattttactaagctaattctgcagcacagagctaacctaggtcgactcagagacatgatcaatatggttctagcttcaaatcattggtaataataaggggggatttttgtcgaacagttggtatgcgcaaagaaaaacatgcaagaacacaaactaaaattaaagaacaatgcagaaattaacaagattatcaaggagtaaagtaaaacagattagaaagcatcaatcaaattcactaacccaagctatttgaatcatcatcattcccataaattgactctatcatgaacattcattcaatctcaatagaagaagttcaatcgatcctactcctaaattaattgaaaccacaaccctaactgaactatcattcaattaatcttgtgattaacatttgaaattaggacatgaatccataatcctaactcactttcaatcctaaatgcattcataatcatgaaaacataatagaaattgaagaagaatgtgaatattcaagtagaattcgaaataccgaaccagaactccaattcttcttttacttgagttagctccttggattgattaatgatttagccttccatgatgatcaccaaggaaagccccatgaagtgaatgcagaaaaatggaagaatagaaaaatggaaatgaagaagatgaagaacaatgaagaacacttgagagaaaatgaagaacaagcttttcattctaaaaactaaagaaaagaaatgtaaaacttgtttattgaattgtaaagtactgtccaagttttcactaaagtcactaatatattagtgactaagttctgaaaatagaatgggccataaacaaacccaacaatctaattattcactatttacaccaccaaaagtccaattcgcagcccaaaattacaagtgcagaggtgctaacttaaaatcttaaaatgaccctccaaatgacagaattagccttggactatttctagaaaacttgtagatctttttgttatctttccagggactcctagaacgctgcattcggagattggtagcactttataggtcctgcacaagtcagatactgtaacaccccaaaattttggaaatgaccaaattgcccttaggtattttagcaagatatcttaaggaggaaactttataaatactctaggatgcttgaaacatgatcagaatacccttcgggtaacattacagagtttccctgaacatttttagaagaaatgacaattatacccctagggtgaggagtgaaattaccaaaatgcccctaggtcaaaactgaccaagatgacctcagaaatcaatgggaacctgagcataggataaaatacttttagacaacaaattatcagcaaggttgagggtagagaactctaaaatagaatttctatgaattttggaagataggttaaaaagagcttaatctagactatcctaggtatcagaaaattatgagaaaagcatggacataatctatggagttttctcttaattatgggaggaataggtttcctaaataaattagtttagtaattttactaaataaaagcaaattggaccaataagaacttagaattttgttattacatgtaataaaaggagaaattgttgatttggttatctaagatcaagccttggccgtgtgatacacaatcaagggagaaaagccttaggaacattcaagaatggacacatggagagttaagaagcctaaccatttccattggtccatgtgtaaagaaagtaattaatgcttaaaaagatatttgaagcaaattttatgttgtctcctttggcaaaatacgtggatatctagagacattatttccacgatcccaacggtcaaaatttatatatgtaagataggagtatactattaaaattctaagaagatccaacggttaacgaatccagaatcaatattttattaaaacgggttttggaaaaaattcaagaaatgaagaaagcacaaaattcccttaaaagcttggctactccacgtgaattggtaaaatttgctctccaagcaggctatggcacgtgtagcatcaagaagattgaagaaaacttgagaaaaatcaagaataaagacacttggatggttagaaatcaatagccattaggatttgtacatgtagaaagcaaggtcataatgacctagaagatttttgtaacaaaggcatctgcttcaaccctatataaaggagtgaatggaccaaacatttcaagctttctaagagaaattcacgtgtagcatccacttccatttttcatccctttcacttaaattccaaagcaaaaaccaaggccttccacccttaatgtccacgtgaagatcaaggaaccctaggagcaaagcaaggattcttcaacttcaaataaggaaaagctgtccaaaaacttaaggaaggcaaaggtatgggaattttatgataatcaaagtttgaataggttttatgttaagattcttaaatggtttcatgaagaactaagcttggtactctaggtgtttgatgatttgtcttcaagagcttgaatgactatttgtttaagtaacttggtttaaatcaaggaaggggtattggataataattttgaatctaatttaataaaggaaagttaaaagaaatcaaaaggtagaggtagtatagctaactttaagaaaatagttgtgtatttactagaatatgttgttatcactttgatgaggattagaattcttccatgtttctatgttggatttgatgattagaagttagttaaaaatacgtttatttattcttagaagtatgttaaatttgataaagattaaggtttaagtagttttattggaagaattctatgatttcaagttgcataccatgtgtttgataaattgtcacaatgaagaaattatgtttcaaaattgttggttggaacctttattgttgggtttgaattatatttgcataattaaatgatttaagcaaaggttgcgtgctattcaataagttgtgaagttgaaatacataaagcttatgtgatgataaatgcttctaaatacattgataaagtcaatatgttgcttggtgattttatgattttgatgttgaaaaatggattaagaagtgtattagattaatggtgaagtattggaatccttgtgttgttaaaggtgtggtgattatttatggattccaagagttgtaaagatgttaagctttgaaatatataaaaagaagaataattaaaccattcatgcatttttcatatgcatatgcctagcgggggttaatccgtggagttatgcctggcgggggctaatccgtggagttgtttgtcagatagctaaactgagtccacgcgttcaaaggtgttatgaacttggggatagttgagacagtgaggaccacaccaccatgatgatcacataggtgctatgaacttggataagtttgtgccactgggatggggctatctgactgtggccactgatgataatttaataacctgagatctcagtcatgcatcatataaaaagatgagcatgcattatatacattacatgatgagtatattgtatgaaatagttcatgtgccgtgtagctggggtaatttaatttgtgggtgaatcctctgtgtttgttattttaatattactataaccatctgcatatatattctgttatgtatgtatgtttttattcaaactatggttgtcataaacttaccctagttgtgtctgtggttgacacctgtaatgaccccaatctatttgggcgagcagggaaacagtggaaaacaagctgtgaagggtctttgaagaaaggatgaggaagcttgatgcattgtaattttgtgttgtgtgtattttgtagatgtataatttgtattaaattcaaacagtctgtatattatttcgaacgtataattgggactgtatcatggactgtaattatttattttaatggaaccgtggtgagggagaatcgtttacgttacaaacgaatcataaaatttgcaagcaaagcgaaaaagaatttcagcaaaaaaaattcataactaacatgattctaatacaaagtaaacacagaatttcatctaaaatcaatcaagcacgagagagcacaaagaggcgttacaatagtggtatcagagctgtggtttgttttctaaggactgtatgtttgttgctatgtgcatgtaatgtttttataaatgacaagttttgaatgtagtgtgttcctaagtatttgctatttgttgtgttctatgtgtttgttgcatctttaggaatatatgttctgtaagttgatctgaaacatgaactgagttttctatgatatgcttttaaagaattaaggttttaatctgcagttgagaagtttcttgaattaacctaattgaaattatttgaacaagtaattttattttggtttaatgaatgcttggttgaataaataacttgaaattagcttaatgggtaaatgccgagtgacttgaatatatatgtgttatgactatttgattaaaatcatggactgttttattaaagtttaaatgttgtactaaagtttaagtgttttaagtattccataaacctttgagcttatttatgttatgttggaagcatgcttattctataaagattgatgtttatgaatagcttaatcggtaaagattttaataatttagagttataactatttaatagaatttgttactacaattttgatgattggccgaaatctttctatgatttcttaagtatctatatttaatttgatgctaaaaattaattggaaacatgactattaagaaattaagtataagttttatttcaaaacttttatgaaataaagttgcttatcatgtgtttagtaaaagaattcaaagaggacagagatggtttaagtgttgaatgaaatgtttgtaaacatgtgttgttgagtgaaatcttatagaggtcatgtgttgcttgaggattcgtgaaacttgatgaattttgggtgttgtatgaattgtaaagaaatgagttgagtcgtatattaacttgatgtttagaaaatggttaattgaaattataatggaaggtttcataaaaacattatgtgttttgatgttctataatctttgagcatggtctgtttcctaggactatgtgtataccatgattctgtctgtttactatgtgtttattgtgtgattgtgtggttgttatgttttctatgtgtcgtgtgaagagttgttgtattcctttaccaaatgttctacgtatgatatggtttgtatgtttctaggaaccatggattgagtttttgtgaaatgttttagaaaaagtagattaggctgtaggtttcaatctacaattaaaaagcttcttggattaaaatggctgaaaaagacttacaattatagattaagacttgaaattcatgatataggatggttattttatattcaggaaatgttgatcataagataggtaatgatctatgagttagaaaattaataatattagagttaaattgaatgcttttagaaaagaggttttagggagttttgaggataattggaaggtttggccatattttatgaataatttgaatttatcagtgaaggatgaatggataaatggttaagtagtagagtaatttaattttggaggattaagtagtcaggtggtaggtgaaaagaaattaagagaaaatctaggattgaaattttttgagaagataaattgtggattagttgtgttactaacctggttttttgtgcttaaggtaattttatgatcaagttggacatgagtacacttggttgaggtatggtgatttaattttacttgtaggatgttaagatagaaaatatttttccttaagatgattgatattttatttaaggattttggagatgacaaaataattttatatttctgatgactactataccataagttcttacgcgtattcataagttagcagactggtcacctggataacttgtgaattgcaaaagagacattatggcaagcagtcagaaaaacaaataaatgatatgtgattctaagaatcgacctttatagtgattctgtgagtaaagaaatggattatgaggaaagtatatatttcttagttggggtacgtaagggatgataattagtaagaatggttggttgaggttaaagattagtggaaaaaattttaggaagttcttggagagatatttttggagatattagacatatggaggtgatgaaatttttagaatttaagagttatgatcataatggaatacatgactaagtttgaaaagttaaggaaggaattttcaagaagaggatggtacttatgttagttgggtctagtataattttaagtatttagtaaaactataatttgatttatgatatatgtgttgtgaaaattttttatgttaattcaagttgcttgacctgttgatatatattggttgcctctcgataatttattttcaataataagtattgagttattttaagactggaaataaagaaatatttatctttgttacttaaccttggttatctttgaaaagaatagtatataagattttgtttaacctagaagcgaagattaaggttctctagataatttacttgtcgatagaaattttttagaagtatctcctcataacctattcagtctatcatttggaagaatgatagtttgttatatttgaagttagatatatgatatttaacctatgagatattagggcttgagaaaccattaagagagttgttaggaaagtgaggtatacaatctaaaatgtttctataaaaaacactagtgttactaagaaatataggaacattaggaaaaataagaaactattgatagaaaaaggtgacaaaagtgacagtgaagaatttgtaccaataaaagtagcgatcatgatgctgacaacattttttcaactaactaaatgcagaaaattaaaattaatccccatagtggtgtccatttccacattgttaacatctcatattacgtggaggattttggcggggtagttgttgtcgtgttgtattttttccatcgtcagcagttttttgatgtgattcgtccacatcttgactgatattgaaatttaaaaatgatcgagtgaaaatactaagtgttgcacgcaacaaagaattgctagcatcattatgatgatatgatgggtattatgttgagcacatactttgcatgtatgcatgagatgactttggcattccaaggtttgcccaaaacaaattctaacaaattcttcaaaagtcgatgcaaatgagtgtggatgattgtcaatatttgaatatgattgttgttgagatacaaagaatgcaaatgaaggagttggatccatatcttcattgggaacaatattaggattagagatgttgggatgaagaggtgttgtcatccttcatgcacgttgttgtggttccattttatgtgttaccaacccccttgtcaactgtaacatatgggccttgcatagtcagtaaaggtattgaatttgcaaaataccattccatgtattcacaggttttcaaggaaggaccatgaataagctatcccactattcccatttggtctcattcatttcaaaattcaatccaccttgcatgcttttctactaatttttgtcagtgggtcctcgcatgtcgatcttgtggagtttatcaagatttctaggtcatcttggaacctctttcgtagtccaaattggagcttcaccctatcttcttgttgccacactatggttgcataacaaatcaaagtagtacatgcaatccatatatttgaatccatgaatgttggtgatggtaaatttgttgaaaagcgttgtctgacatccacaagaactaaaaaattaagcatgattagtacattcataataaaagaaacaaaaataacttttctttttaaatgaataaagtattttgtaacctgttcaggtttcatattatccaaatatatcctataagatcgccatgaggcattcccatatgttgtagcccaccaccactccatctaataagtaatggatacgtgggttgacgattgactccggtgcaataaaaggcatgtgataccatgccaaactttacaacaatgaagaagaccccctatgatttttttcttcaggtaagtatccttatgcatttctttgtagagtgtcgctaaacaagctaaaccccaactataggtacaacaagcatgatcaatatctcacaacaacgttaaatacataacgtgaactttgttgcttttttatgtggcattagtacccccctaatcaaccctatgatgtaagccatacaatgagcttcttgaaaatgaatagaatacttcaaatcaaccaagagggggggtgaattggttgaaccttggtaaattaaaaatttaaaatcagagtttcaccacaggatctttaccacttttaaaaattgttctaataccaagaatcaatattcaatcaaattcctttttcaagaagaatagaaaacagagggtaactttctgtgcaatgaaattgattcccaaacaaagcaattaaaagatgaataggtgagaagaaagattagccacagattttaatactggttcacttcaaacactatgaagctacatccagttcttccactcaacactagagtaaagttccactattgcaaaaatatccttacaatcctctctttatcaaccctagataaggttcagaagtctaaaaccctattagacccttagagaccaaaacccacactgagaacactactcagctgtccttagagaaacactatctttaaccttgcaagaaacccatttacaatagactaatctttatagaaattcaaagaatagttttacaccttcaaagaataaggaaagatattacctgataatccaagaatgcatgcacatgaatgattcaatagattgaatgacagattaccaactcaatgcattcctttccttgtgctttgaatgaacaatgaaacttcaccttcttgattaaaaaaaaaccatgcaaatttgtgaagcctcaatgtgtttagaaactcagaaatgttactaatgaaggctcagaatgtttgtgaatgcttacactttgtaattctcaaaatactcaaaagtcacaaacctcagcctgagaggttctatttataacagctttttaactgaaaataatcgattaaacacgttccagtaatcgattatttcgtatatgtagtcaattaaatatagatagtaatcgattaaaatgtttaatatatgaactgagtttcaagaacgaaccatttagtcgattattccgatacgtaatcgattaagacagaggcacaagtttttcaaaataaatcatgtaatcgattaaaacgatatgtaatcgattaagatgatcttgatgcattctaggttttgacaaagaacaatataatcgattattccatgaagtaatcgattaaactagtcagtatgtttttctaaatgcactttgtaatcgattatcacgatgtgtaatcgattaagtcagtaggccatgttttcctaagcatgtatgtaatcgattaccaatttctgtaatcgattaagctagagagttctatttcttataaaaagcctaagtaatcgattaatccgatatgtaatcgattacaatgttcttgctttgttttctgaaaggcgcgaagaacaaaataatcgatgtcactagccttgtaatcggttaatgtagtaaggtttcatttttccaaaaactttgctttttaaatgccttacttatgacttgcctttaactaatccttttaatctaacaatcctagatgaatgaataatgcatgatatgcacaattggattatcagatcatacacttccttttacattaatcaaattggtcttcaagcttttcatggaacttttcctttgagcatgttgaaagcacaaaactcttgaagcttgatccttattcattgatgcttggcttcacttgaatcaacaatctccccctttttggctttaaacatgccaaaccttcaatttgattaagtgcagatacttgggaattattttgaatagtcattgttgaacaagcttctataaacctgaaagatttcaataccttgccaagaaccaagtgttaaagcacatgtgatacatgatttattcaattaagcattataccagttgattgatttcctttttataccattactccccctaaatttcagcatatattcagatcaaatttttggcaaaaagttgaaccacaaacaggggcaaacagagtgcttttgaactcactcccccttaatcaattctccccctatttggcttgttaaaagtcaaaaataagattggcacatcggatttaatactggaatagcataattcattgatatgaaagcatagaggacagtacataaaggaaatttaaaccaaaatataaaagaaaacataacatagttcattaaaccagaaaataatccaaacataaactaagcaaactaacaatcctagaattcagctgaggcttgatcattcatgttagcctcaatagcatccaatctctctctaatatcttctaaggcttcatgggtttcagtcttgaagtcttcttgaagcttcagcatggagtccatcttttgaatcatcaaggattcaaaatcagagaaggcttgctgtggttgctattgatgtggttgaccttgttcctcttcagaatcagcagccatctctccttgttctgcagctccaatctgggcagccatcacccaaccattgggtgtcttcctcatgcccatcttggtcaagtgtttctccttaatttggctattataggtgagggtgttgtctataacctcattttcaacatctatgttgaaatgatcaataagcctagatacaaaaactggataagggaatgggtaattaaccaacctctttgatttcaacatgatttcttcaaaaatcagaggccaattcataggaatgtgatgttttagcccataaaccaactgaagatcttcatcagttgcttgggcatggtttgtaccccttggagtgatgatgtagataataaggtaatgaagcatcctatcttctgcagtcattggcccagtgccaagtctagttctcagcctcatgtgtggatcatgcagcatgctcctatatgtgtccatcttactgtaacccttaggatcttcatcaaatcttcaggctccctcacagactactccacctacagtttcccatatatcaggggttatgtgcatggttacccctttcacttttgatctcatatcaccttgcattgaacctttcaagcaggtgtaaaacactctaacaagatcagggtagaaagtacccttcatctctagaaacctcctaaggctttgagactcaagatagactgggaattggaatccttgcctaataaaccagcctaactcaatgtacttaggggttgccacaggtttagtagcattgaactgcaggtagttcattttatctgtctccgaagagaaccagatatctaatctgttggctagttgagggacaggggttgaggttgagaagatgattctccaggctttctttttggcttcctaatccttttagtagaaggctcagacatggtgtttagagagaattgaacacagactagacacagagagagaaagcagaaaaatgcagaatagaagaagagagttggtgcagatattctaagacatgcaattcactatttataggcacaatttaggctctcaacatccataatttataaaaaatatagctattgggacggtttaatggcattgagtgttgttttaaaacggattgggcagtttaattaactcataaaaactgtcagaattcagacaacagcatgaataatcgattatttcgtaatgtaatcgattattccagttcaattaggcttcctgttaaacacatggtaatcgattatttgcataagtaatcgattatttcaatcttgatcagaggttgaagatgacctgtaatcgattctttgcttaagtaatcgattattttacagcttgaatcagttatccaagtatcagggccataggtaatcgattatccccagtgataatcgattattacagagtgagcatcaattcaatataaatggtaatcgattacggctcataagtaatcgattattacagtgagacatgattttagttctgaaactttgagtaatgtaatcgattatcccaatgtttaatcgattattctagagatagacaatttctgaaaatgtgaagaataatcgattaccattggtgtgtaatcgattacatgagtacaaatttcgttccagacttaagttttaatgattttaatcgattaacccgtggtgtaatcgattactacagagaaactatcagaaacagagcatcttggcagctttttgacattgatacaaacatttaagcatttaattccatacaggctttcacatatcatatacagcatatacaaaacaagctagataatgttgctttcatcaaggatccctagcatgtttctaagtgtataaaatctatccctagatagaggctttgtgaaaatataagctaattgatgattggtgttaatgaagtctacctttatgttacctttttgaacctgatccctgaggaaatgatgtcttatctcaatatgctttgttcttgaatgcattattggattctttgatatgttgatagcacttgtgttgtcacatagcagaggaatagcattcagttatactccatagtcaagcatttgttgtttaagccacaagctttgagcacaacaacttccagctgaaatgtattatgcttctgtagtagataatgccacacatgactgcttcttgcaatgccatgagatcaatgagcttcctagcatatgacaagtgccacttgtgcttttcctatctaatttgcaacctgcaaaatcagaatcagaataaccaataatatttaaagaagcaccttttggataccaaagaccaactcttggtgtagctttgagatatttcagaattctcttgacagctgtaaggtgtgattctttaggattagcttgatatctagcacacaaacaaacgctgagcattatatcaggtctgctagctatcaagtacaacaatgatccaatcattcctctaaatcaagatatgttgatgtagtcatgggagttgcagcatccttgctcttgtccatttcaaatttcttaatgatttccagatagtatttggattggttaagaaaggttctatttttcatttgctttacttgaagtccaaggaagaatgtaagttcacccatcattgatatttcaaattctttctgcatagctaatgaaaaatccttgcacaacttgtggttaatagaaccaaatattatatcatccacataaatctgaaccaataagaaatcatttccaagccttttgataaacaaggttttatcaacattgccccttgtaaaagattgtacaagcaaaaatttgcttaacctctcataccattgcctaggagcttgtttcaaaccataaagtgtcttttttagtttgtaaacataatttggatgtttaaaatcttcaaaaccaggaggttgttcaacatatatgtcctcctcaatgtatccatttaaaaaagcacttttaacatccatttgaaaaagtttgaaatccatgaggcatgcatatgcaagtaataatctgattgcttccaatcttgcaactggagcaaaagtttcctcatagtctatgccttcctcttggttatagcctttagctaccaatctagctttatttctgactatgattccactctcatcaagcttatttctaaaaactcattttgtgccaatgggtttaagagatgaaggtctaggaacaagttcccaaacttcattcctcttaaactgattgagctcttcatgcatgacatgtatccaatgttcatcactcaaggcttgatcaatgttcttaggctcaatttgtgaaacaaatgccatatcacaacataggttttttaatgaggatctagtagatactccctttgaaacttcacctattatgttgccaagtgaaaagtctcttgttgttctccaatcttttggcatttgaacaggggttgtgggtcttgcttctgtttcagctcttggttcttcaattttagttgaagtgttgtcaatttcaattacttcttctagctgacctgcattaccttccaattctttttcctccttagagggattagtttcatcacaaatcacatgtacaaattcttcaatgcacattgttcttttattgaatactctatatgccttgctatgcaatgaatatccaaggaaaattgcttcatctgccttagcatcaaattttccaagtgattctttcccattgttcagtacaaaacacttgctgccaaagactcttaagtgagaaatgttgggctttcttcctttgtatagctcattaggagttttctttaaaataagccttatagtaatctattcaaagtataacatacagtacttacagcattagcccaaaaatacttaggtaaatttggttcattagaagtgttctagctccttcctcaagagatctatttttcctctccacaacaccattttgttggggtgttcttggagctgaaaaattgtggttaattccattttcctcacagaatttttcaaaatgttcattttggaattcaccaccatggtcacttcttattgaaactattttacatcctttctcattttgagtaagcttggccatttttctaaaagcaaggaaagcatcactcttggatttcaaaaagagagtccaagtgtatctagagtaatcatccacaatcacaagtccataatagttgccacctaaactcatagttcttgaaggaccaaataaatcaatgtgaagtagttcaagtggtctagaggtggaaacaatgtttttactttgaaaacagttctttgtttgtttccccttttgacaagcatcacaaagtttgtctttctcaaatttgagtttgggtagcccaattactaaatcctttttaatgatcttgttcatgtgatgcatgtttatgtgacttgcccttctatgccacagccaagtttcatcaactttgctgattagacatgaagatctatggaataatgcatgatcaattgaaagaacatatatattacctttccttttacctatatgcagtacctcaccacttttctcatcagaaattatgcaacaatccttgttgaagtttactttgaagcctttgtcacacagctgacttatgctcaacaaattgtgttttaatccatccatatacaacacatttttgatctttgctttgatgttgtctccaatattgccttcaccaataatttttcctttgttattatcaccataagtgacatatcctccttcttttaacgtcagatttgatagaagggacatgtctccagtcatgtgtctagagcatccactgtcaagatgccaagttgatgtcctagctcttagacacacctacaaaattcaaatcagaatttaatggaaggtacccactcaaggttgggtccataagggttagcatttctctttactttgggaatccaaatgcaattaccattaggcacatagaatctcctaacatagcatttaaaagatgtgtgcccattctttatacaatagttgcaagtgacagattttgaagtttccctaaaatcagaatatttgttgactcttgagttcttttgccacttttgattcttctgtttttgaggtacaaaaactgtttttccatatgattttgaaccatgtttataccccaaaccagaagtatctccagcatatttttgcacacttaacatttcagccaagttgcattttcctttataaaactttctcaagaggtcaatcaaataactgttgttggataagagcaacatatatttttcaccttgactttgtttatactcatcaaaatccttttgaagcattttatacttgtcaacattgctagaggaagaagcacacacacatccatttaatttgtaacttgaaataagtttttcattttcttctttcaagttgcaaatctcattttgcaattcagttattttctcaatatgccatctaagatttcctttgagcttattattggatttttcaagtttttgggcttcctcatacatttcttgaaaagcatgaatagcttggtcaagttcagaatttacctcatctctttcacttagcaaatcatcatcatcattgatggtggaggtgagacacatgttggcttcttcattttctgtagaagaatctgaagttgttgactcattatcctcccaagttatgtatgccctctttccttttccttcttttttcatcttgttttctccttgttgcttcctcaagtagattgaatactccagatttgatgtgacctggtttgccacactcaaagcatgtgaaattgttgtcaatcttcttgttgaggttgttgttgttactgctgtttttgctgcctttgctgaatcttttattcttgtttttcctcagaaatttgctgaacttcttcaccaccaagtttacattatcttcatcatcctcttcacttgtttcctcttccttttcagctttcaaagttatagttttcaaggctatgtttcttgttttcttttctgcatcttcacaagatgttaattgagacatttctaattcatattcaagaagcttaccaaatagtgctgccatggacatctttgacagatctttagactcaatgattgctgtaacttttggttgccaaggtcttgttaagcacttcaatatcttgatgtttagctcttcagtgtcaaagacttttccaagacccaataggtgatttataatgtgtgtaaatctggtctgcagctgtgaaatgctctcattggagttcattttaaacatttcatactcatggatcaaagcatgcttccttgacctttgaacttcctcagttccttcatgagtaatttccagcatctcccacatctcttttgcacttgtgcatctcacagtcctaaaaaattcatcagaggaaagtgcagagatgatcatatttttagctttaaaatcatgttgggcaactctttgttcagcctcagtcatctcatcccattctttgggaatcaactcatttgcaacagttttctttggaataaagggacccttctctattgcattccatgctcctgggtcatttgattgaataaagattgtcattctatttttccaaaaactgaagtgttccccttcaaacataggaggtctgtttaaagaggcaccctccttaaaggttatttgagaagtattcatgtttctttttgaaaagaaaagtgatcttgaatatcttacaagaaccagctgataccaattgaaaatgaatagaatacttcaaatcaaccaagagggggggggcgtgaattggttgaaccttggtaaattaaaaatttaaaatcagagtttcaccacaggatctttatcacttttaaaaattgttctaataccaagaatcaatattcaatcaaattcctttttcaagaagaatagaaaacagagtgtaactttctgtgcaatgaaattgattcacaaacaaagcaattaaaagatgaataggtgagaagaaagattagccacagatttttatactggttcacttcaaacactatgaagctaaatctagttcttccactcaacactagagtagagttccactattgcaaaaatatccttacaatcctctctttatcaaccctagataaggttcagaagtctaaaaccctattagacccttagagaccaaaacccacactgagaacactactttgttgtccttagagaaacactatctctaaccttgcaagaaacccatttacaatagactaatctttacagaaattcaaagaacagttttacaccttcaaagaataaggaaagatatcacctgataatccaagaatgcatgcacatgaatgattcaacagattgaatgacaaattaccaactcaatgcattcctttccttatgctttgaatgaacaatgaagcttcaccttcttgattaaaaaaaaagcatgcaaatttgtgaagcctcaatgtgtttagaaactcagaaatgttactaatgaaggcttagaatgttcacttcgtaattctcaaaatactcaaaagtcacaaacctcagcctgaaaggttctatttataacagctttttaactgaaaataattgattaaacacgctccagtaatcgattatttcatatatgtaatcgattatatcaagatagtaatcgattaaaatgtttaatatatgaactgagtttcaagaacgaaccatttaatcgattattccgatacgtaatcgattaagacagaggcacaagtttttcaaaataaatcatgtaatcgattaaaacgatatgtaatcgattaagatgatcttgatgcattctgggttttgacaaagaacaatataatcgattattccgtgaaataatcgattaaaccagtcagtatgtttttctaaatgcactttgtaatcgattatcacgatgtgtaatcgattaagtcagtaggccatgttttcctaagcatgtatgtaatcgattaccaatttctgtaatcgattaagccagagagttctatttctcataaaaagcctaagtaatcgattaatccgatatgtaatcgattacaatgttcttgctttgttttctgaaaggcgcgaagaacaaaataatcgatgtcactagccttgtaatcgattaatgcagtaaggtttcatttttccaaaaactttgctttttaaatgccttacttatgacttgcctttaattaatccttttaatctaataatcctagatgaatgaataatgcatgatatgcacaattggattatcagatcatacacttccttttacattaatcaaattggtcttcaagcttttcatggaacttttcctttgagcatgttgaaagcacaaagctcttgaagcttgatccttattcattgatgcttggcttcacttgaataaacacttctaactgtttttgtgttggttcttcgtcaggaagaggcatcatattttggtacaagcatttaagtttaagcgtcgatcctactattgtgttcctttaggaggaacaacacctaaatatgttgtgcacattttatgccagtcataataggttggaccagttattggttttctatcaaaccatactcctagttggagtgccacatcttgtagttttattgtgcattcaccaactggaagatggaacgtgagtgactcgggtctccaactttctaccaatgcagtaaccaaatgttggtcaatcttgaaatggcgtagctttgctatttcagcaaatccagatcgcttcatcaatggtatgattttggattcaaggcaggcatagagtgacaacataatgttataacattttgttgagtgccctgtaaaattaagactataacttgttaaagtcagggggagctcaagaagatcaagaagctaagtctcttaggcaactaagtatttaggcttttttacatgccaaattaattgattggtagttgtaattagtgtatgtctaaggaagactatctatgatccgttgcataaagctcatacatatttttgcatccatgttttcataaaagcataatttttgtgaaaaagcttttctgaaacataaagttttcatggtcgcataaaaagccaaagtgttcaatatttaagtttttggaaaaacatttttttctctgctttaatcgattaccagcaaatagtaatctattacttaagctttcaagaacactttaattgattacaagagtatggtaatcgattacactacacaaaatcatagaaaagtcttcctgtgatgatcgattacttgagcatgtttagaaaaaaaacttcgtgtgataatcgattacattgcgaattgatcgattacattgctcatgaatattttccagaaagttcaagaacactttaattgattaaaagagttattaatcgattacataagtgaatttaatcattacattagtgaattaatcaattactgacagttacaaactaatttctataaatagttgttggttgttttgaaaagtaacaacgaaatatcaaagtattttcataagcattctgaagtaagaaaagattccaagtgttaaacactgttagacctacaaatcgtcaagctttaagatttctaagaggatttctttttgggaaaagtttcaaaagaaattttggaaggaaagttctgaagttgtttctttcaccattgatccaagtctggtaatcttttgcatacatcattactggatcatcatatggtttcctttcatacaacttgtttgtaagatcttttgtatttctttttgtgtgtagctataacaacagttttttttaaggcttttctagaataggtatttctagaggttaagagtggagataagttttctctatatcttgatcacaaagattctaagtgtgctagatatctcgttcttgatctaggtgtgattgagagtggttgtaaaaagcttgtaagaaatagattgttattagtggaactctaacttgttggttagaagaattggatgtaacttctctaggttgagaagtgaaccagtataaatcgttgtattgactacttgatctttatcttttcttgttgttattatttgtcattttattggtggtgcatttcacaaacaatagaaaaaacttttgattgcattctttgaacaatggagtttgattggttgaaagctttcttggattgttttgtgatacgatcttgttaactttgattgtttaagaattttttaattgttcaagatcaaccaattcgcccctcctcttggttcttgtgtgttgttcatattgttttcataactatgacaacaagacaacgctagtgggataaaaatgaacgatcgtttgtgttaaaattgattaaaacttaccatgttatccgctattgtagatctgtgttcatatttcttccataacaaggttaaagtctacataattgtattcataagttaagaaataatgataattggaaggggttattattttattgatgaaatgattgtgtatgtaactacgtgtaatgactaatatgtatttatactagtctcaagcatttgaattggtgtcatgtcagtcattacttttcccttactcaaatggaaagtcactaagagaatccatcacacatgaacaatatttgcccattatttctgccacatcggtacactggaacttcatcatgaatgtctccatttgcacatgggtaaatgtggtgcatctacatatgtttaaccatgattgtcttctatacattgccaattgaattttgaaaagaaaattattgttgagtgtgcttttatgggttttattgttcccccgtgaagaatcaaaaagcgtgaaaagacaaacaacaattgtcattacaccaacaaaacagtgggtcacacttaagtgtctcacacttctaatactgctcttattcaacgaaacagtgggtcccaactgagttgtggcgcaccaccatgtagaggaattttgagtggcatttgtggtgggaggtaatcatgtgcttaataattgattccttttaagggttttttttttattttaatgggtctcaccaaacgtgtaagtactattattatgctagtcgtatcctatgtcaaacatctatcggattacactagttgcttttggacatgcataataaaacatacattcacgatactctatctcatgcatcctagccgttttaaaacatacatccgcgatactctatctcatgcatactagtcgttttaaaacataaaacatacataaaacagattttatatgagatagtcatggtgctcgtgctttctttcttcttgctcctaggccgcagctccatcatgaaatcttccatgcctaaacgccactagcctaatttttctaattacaaaataattaaagaaactccaatacatctttggatgaacaaaagaatatacaaaatttaaaattcaaaattacagctccaatttaaactaaaacaaaatctgaattcaaacttaaaacatttgaattcaaatatttaaattcgggcaccatgaccatccccttccatatctgcactttaaaaattaaacaactaacaggcacacaatataattatttctcatatggccgaaatatgcatccagatacataattcaaatttttgttgattctttctcaaagaacacaaaaattaaaccatacaatcagtcatttatatacatagacttgtatgagaaatattgttacaaaaataatgttgtaacaccccgtaggcctccgacgtgttatcattaataatatcagattagcgtataaaatatcaattaaatagttcagcggaaacataggatcgttttcttgatacattatgtatgaaatcacgtaacagaaaaccataaactcatgcccctgctgatccagtttatcaaaaccacataaataagacagataacagagctttaggcagagtaaccccactataaacatacacatgtactcagggaacgtctcatatacatattatcaaagttctgtacataacatatacatcagtgttcaccacatcaaggtgaaatcaaaatacatcatccctcacaggggtatacagaactataacaaaatacatcaaaatggagccctcaagctctctatcgtagccatcagctaaactacttagtctcaactgagcctcctgccctgagactgatcttctcgtctagatatatcacctgaaatcatacaaatccccacacggggtgagataacatatctcagtaagctcagggttcatgggaaatcattcccaccctgactcacggattcacaacacaagcattaaacaaacacacacatcataactggacccatgtcctggccctctggccctcatcacatcatagcattaatacacaacaaatggcagagaaccctccatgccctggcagagaaccctcaatgcctcggcagagaaccctctatgtcgttcctagtggcagagaaccctccatgcccttggcagagaaccctcaatgccaataatacaaggcagagaaccctcaataccctgtactcaatctattggccaacagactcatcttaattataatcaatcatccagtacagatgcacacaatctcagtacaacaatatcacagccaatgcatgcatcatgaatcatgaccaccactccccaggagtgtggtgtgcaatcaagcgggaatttattccccaaaacactgaacttacctggtaaggaggtctcagactgcagttcctttccaggtctgtggctcccgccaccaacagtatcaagctcacggcctgatcaaagcattcataatcccagatcaatactcagccattaggcttaagcacagcacatataaccatataagtcccctatcctagggtttaaccatttcagtctagtgcacactaggccataacatcatattctaggctctggaatggcctttacactaatgaagatacaacacacaggccacacagacaaccacagagccaaaatccaaaactatcagactcaaaaactgaaagctaatccttcatctattctaagccctgatcaactttctcaactggaccctgagctaattctagtcccagctcatatgggtcactattcacagagacccccagaatcaaaatcaaacgatgaaatctaagtttcttacctcaatggcgcacccaacagcctcagaacagcttctcctagcttccacgttccaattacgctgtggttttacgccaagctcgagttctctgagcttttccctctgaggttcctcttctcactcaatctggggttttcaaggaaattgatgaaggattcaagctttctactcggttcaatcaagtttcgaaggctcaggaaagtgtttaggctgagaaatcaagtcctaggaagctcaaggacttcaacaatggaggttggctcaagggaggaagaagaaatggtatttcctccatttctcacgttctggtcctttaaatgctgatctgccgacgttcccacgcgtttcacttgggttcccacgcgactcacgtgggatggcagacaaaaatgccatttctaagccacttcccacgcgactcgcgtcgtttcaccacgcgactcgcgccattcattcgggccttccacgcgacacgcgtggatcccaaatgactcgcgtggaactccagagaaaaccatgatttctggaccacttgccacgcgactcgcgtggatcgtcaagtgactcgcgtgacatggcagagtcatctgccctatattacacatatggcgcgcgtcgcgccgcaccccaagtgggtcgcgccatatgccagaaccaccataaaacttagattcatgcttaactaagcttaacatatacttacgaattcaagctattacacttggcgccatccgccaatccttgcgccaccggcgccgcacccttagcagggttttctgacctgaatccccgcgcgatcgcgcggggttaagcgccgaaaataaaagtccttacattcatccctccttttaaggaattttgtccgcaaaattcaggaacatacctggtaaccaactcgggatacatctgcatcagctcctgctcccgctcccaagttgcctcttcaggtgtcctgccttcccactgtaccttgacgatgggaatggtcttgctgcggatctgcttctccatcctatccagaatcctcaggggccttgtaggacttgtcaaattctctctaaactggactgtgtcaggctctaccacgtgtgagggatcagctacatacttcctcaactgtgacacgtggaacacatcatgaagtcctgacaactggggaggcaaagctagcctgtatgccactggtccaaccttctgcaggatttggtatggaccaatgaacctaggactcagcttcaagtttatagtggggttactctgcctaaagctctgttatctgtcttatttatgtggttttgataaactggatcagcaggggcatgagtttatggttttctgttacgtgatttcatacataatgtatcaagaaaacgatcctatgtttccgctgaactatttaattgatattttatacgctaatctgatattattaatgataacacgtcggaggcctacggggtgttacaaatgtcatgctcatgaacaattcattataacaaaacacaaaatataacatgatcaaaatgaacaaaattaataaccctaatttttattaatgtgaccatgacatgcatagaatatattttgaaaacaaaattatgcagaaaacaatatatttgaatattcatatcatggctgaatcatattcctttcttaaaagatgtttctttgaaatctttcacaaaggatcataaagaaaaaacaaaaccatgaacacataaagatacatgtaaagcataatcatattacaaacaacatattataacaaacaaggtatcatcaccagtctatagtaaagctaccaggctctgataccacttgaaagatagtgccttgaagcccgaaggcatgtgagaagaaaaacaaaatttttttcaaagcggaaacacacataccattcaagaatcattctttaggacatagatgttacctcgtttgtattcgaaacttgatgatcaaggataggcttgaagatacaagccctctaatgttgatccacaccacttcttgaatgccaccaacaaacaccaaaggaggcaagttaggcttaccaatggagaggaagaaggttaggttttaaagtgttttacttatctaagagactcaccaatagatgatattggtggctgaattttcagccaaaactcacacaaaggggcacgtgaaaaggaggaagatagatagggtttttctcaaaaacattattagagaactatgatcacaagagtatatttatagaagagttttaggtcagatttttaaccataaaattctgatcattaagcatctcacacgtgaagaaaagatagagttgttgtatttcaaaaattgccaacaacctcctatcttatcttcttaagaccaagtcaattacttggaatttattttgcaaaataataatcaaatatccagccgtatgataagcctctaatcagccctaaaacttcttcctaaaatctaggataggatcatgataagatgctagttgaattcaaattcaaatcgagctcttatcttctcctattgatatgaaactatctactatagttaattcatatttaaattcaaaatttaaattatcaaatttaaatattagataattaatttaactatttaaattaattaataatgttctagactatccaagcccattaactccattcatgcgcccctctctctttaagataagtttctaaacgctttcttgggccaacaaccattattaggcccaaaatccttaatgctataatgtcatgacaataaagtgttagtgtgtgacccattaggcccaacatagctactgacataaatgagtttgggcccaacaaggcctctacccatttaatgacaacacagagcactagcaatgctttgttgccccagaactagttaggtaaataacaagatcatcctattaaatctatttggtttccgtatgtatttccttttgtctcggttaccttcccataagacctagggtaaggaaacgtattagccattgcggtctagggtaagctttaatacgaaatagggagtctccaattttactgactctaaaggcaaatcatctcatgatttcttttactatgcatagattctcgagtctcgtaaatgtcatcccaatttctccggtttacagataacctaatctctcacagagatttgacgaattccttcagctagtcaccctagactcgtgttctttcaggacatgcccaaaggcatacctatgtgtctctatgtttcaggcagacgaggtatacaatcaaagcatgtcttctagaacacagtctaggtgaaaacttctagtctaaggaaagacacccaaataataaaagactactctaatgatactatctgtgagatttcctcataagagtctctttgtgggtccgtccagtgcgagctatacccttataggtccacccacgactttagctaagacatctccatgtctgtagctcatgaggtctttaccttgtatctgcatacaagtagataagtcgtgttagtcttacccgagatcactgatcctcattttcagtgtctctagactaggaacttaaatttaggagcagacatctagtatccttgaatcctcatgatcgtgatccaatcactgatattcaatagatacctattctattccaagggttttatccatttactcatatattaataatgatatcgagacataatatgaaacaagataaagagcgcttataatttattcatgacaatatgaaaagtacatgtacatcctaatctaatgaaaagattgtctctaggacatccatatactaacaagaagtggagaaaaaattcattacgagattctttcctccatccagattcattagtgcaaaatcaggcgttgctactttttcccaagggtttgatgaacctctctgtgagacatgggagattcaaatctttactgcggaggtacccaaaccataattttgatgatgctgcacaactacatattttctacagtggtttgagaccttagacaaagatgattcttgatgcctcatctgatgtactatgatgtctaagagtctcgaggaagcaattgtaatcactaactctatagcagccaatgattattagagtcaccatgataggtctccagttcaaaggaaaggtataatgaagatggatactcagaatgcaattctagctcagaataaactcttgactcaacaaataaaggccataacaaaatagataagccaacttcctcaacaatttcagcaaagtgaatcataaaatgcaccaaggtcatgaagttcaacaagttctgagatgttatttctatggtggtgaccatcagagtggccactgttcagccctggtgattgccaacaggaagatgaagcccattatttgcagaatcaaaccaaacctcgacagaactttcaaggaaattaccaaggctatggaggaaacaaaataataatgcatattctggtcccactaactcttcttatgcaggtcattctaacaactcttatgcaggtccttcaaataggggtccacaacagcaacaaactcaacctaatagattgtcaaaaatggaagatactctaacttagtttatgcatatgtccatcacaaattagaagaacactaatgcttccattaaaaatattgaagttcaggttggatagcttgcaaaacaaatgtctgagcatgaaagtggattctttcagcaaacacacaagtgaatccaaaggaacaatgcaaagcaattacaacaaggagggagactgtggttggtttgaaggatgatggtgagaaaaatgaaaatgtaggagacgaagaagtggaagagaaagtggtaagtgaagaggagaagcagaaatcaaagaaacaaacaactgacaaaggcaaagttgttctaaaccatccactagttcaacatcttccttatccacatgctccgtcaaagaaagataaggaaaggcagtacaagcgtttcttagacattttcaaaggatgcagattaacattcctttttttgaggcgttggagcaaatgctaacatatgttaaattcatgaagaatttgcttacaaaaaagaaaagaattatggatgatgaaacaatggagttggatgcaggttgtagtgcaattattcaaaaattcattccagagaaatccagagatcccgatagtttcacaattccttgattgttaggagattatcagtgtgaaagacacttcttgatttaggtgcaagcatcaacctaatgcccttgtccatggtcaagcggataggagaagtagaaatcagaccaactaggatggctttatagctagccaataaaactatttagcatccttatggaattattgaagatgtattgtgaaagttgacaaatttctctttccagtcaactttgtagcgatggatatggataaggataatgaagttccattgattcatgacaaacctttcatgaagactgctaaagttttgattgatgttgatgaagaaaaactctctgttagggtgcaagatgatgaagtgaaattcaatgtatttgaaaccttgaagcaccctaaagataagagggagtgttttagagtggatgtcctggatgaagtgatttctgactccaagaggttcattcaaagaaaatatggtttagagaaaacattgactgaaggatttgaggacatgagtgaatgtgaggaaaatgaaagttcaaattgtctccaacaactagatgctttcaagtaaattccttaccaccaatctctctttgaagaattgaaagaagagaagtagaatgaagaatcaaagatggagctgaaagcattaactccgcatttgaaatatgtttttcttgcaggtgattcatagaaaccaattatcattaattcaaatctttctgaagaagaagaaaagacactggtgaaaattttctaggagaacaaagaagccattggctggaccttatcagaccttacatgtatcaatccttctcattgtatgcatagaattttaatggaagaagaatataaacctgtagctcagccacaaagacggatcaatccaaccatgaaggaatgccactttatggtgactgaaggcattgtattgggccacaaaatctctattcatgacattgaagttgacaaagccaaggtggacgtcattgaaaaaatgcctctgccaacaaatgttaaaggcatcagaaactttctaagacatgcttggttttataggcatttcatcaaggatttttctaagattgccaagcctttgagcaatctcttgaacaaagaagtttcatttcattttgatgaattgtgttcagaagcttttgatacattgaaacaaaaactaatttctacacccataatcattgccccaaattggacacttgattttgaaataatgtgtgatgctagtgattatattgtaaaccagttttaggttaaaggaaaaataatgttttccatgtcatacataattacttatggtagtgtatgctttggaaaaatttagatcttatttgatgggatctaaggttgtaacttttactgatcatgctactataaaatatctgttggtcaaagctgactcaaaatcgagacttatctgttggattcgacttttgcagggatttaatttagaaatcaaggataaaaaggggagtgaaaatcatgtacctaatcatcttttcagacttaccattgatgaggtgagcacacaaggtctagaaattcaagaagagttttctgatgaaaagctattcaacattgcagaaggccatggtttgctgagatagaaaattcaaagcagctggtgaaagttcaaaaaacgcagcaccttggtccaaccacggtgtgctcacatgagggtaaaaacaaaaaaaaaaaaaaacaaattatgaggaaacataggccatctatgcacctcatgtatgtgtgcttaggaattactcattgaaacacattggggttttagaaatacctttatcacttgaaggctcaaagaagatgacaccctccaatggtgatccacacagttatctcattcttgcaagtgaaaacttcttctccttgatggcttgccaggtgcatgcaaggtgtgaggctttcaagtatttggtttcttttctcaagattataatagtgccttgaggtcaggtgaaggtgcaacaaaagaggaaagaagatgagggagaggaaaagctagaacttggttcagaaccaagagagaagggggcgaaaatttcttctcttaaatcctccccacataggcgcttatttaaggtgagatgaggttgttgcattgcatgatcctctcactccaaatcagcccaagttgttggcaaaatttttgaaaaagaaactagcaagattctctccaaaaaccaccaccctctctccctctcctccctccaatgtttgttgcaacaataactcatttgaatttagaattcaaatgacaatgttgttgagagaatcttcatccaatctttattggataattcatttagataatttaaattatcctcaacaacctaacctcatagaatttcaaattcaaattcaaatttgaaatttgaaatttaaacttaaatatgaattcaatcttatcccagtttatgatttgaatttgaattcgaattcaaaattcaaattttcaaattttaaatttcaaatttcaaattcaaattttgagtttgcccaaaacttattttggtcaagtcaactccttgacttactaggattcatggcccaaggcgcatcgggtctgtcaacacatttaggcccattagtagagaaaccaatttcaccactaatgccccaaatagggcgcatgattcaagtgggcttgaagttcaactctaacctaatttaactcatagtcttgataaagcccaataactaattattggcccaaagtcgctataacttgcaacaaagaataacctttgtgtgtgacttattaggtccaattagtcactgacataaataaacttggaccaattaaactcttttaatgggcccaattcatttaatgaccacataagacactagcaatgctctacgaccctagaactaattgagttgatcaagtgatctacctttctattttggatattgtgtctccatcatccctcacattgtcattcacatttagtcgagagcaaggataaagtatcatctctctttattgactaaatacagcttttcacaggaactaggaatcttcttctattaagtctaagatagatcatgactcatcatggtctcttactatgcatagattctcgagtcaactagaagtcatccaagtcataccattcttgtgaatgactaatccctcgtaaaagattgtgagtcctttcgacatgtccatttatactcatgtattcaggttatacccaagagtacactgttctccctatttttaggcggatagagtcgtacagtcaaagtataaccctaagacatagtattcgatgctatcctcaagtctaggacgatccgcactaccaaagatgagagacttcacaaatctaatgatattttaaagaatccttgtggagcctctcggcgggttagtttagtgtgtaaagaatatggatatctcacacttaaccgagagggggggtgaattggttaaaccttggtaaattaaaaatttcttaatcaaaatcagagttcctaggatctttatcacttttcaaaaccaagaagccttattcaatcaagtagcttagccccaaggaattcaatggatcaaaactgactttgttggtcaagcaatttaatcaagaacacaatgaatataatgaattaagtaataaagaagcaagacacaatcagatttatattggttcacttcaacactaaaagctacatccagttttcttccaaccaacactaggttagagttccactattataattttcagttcttacaatcaattacaatgtctccctttatcaaccctagataaagaatagaaatctaaaaccttattagattctaagagacaagaacctgacaacactactcagttcttccacctagagaatcctttctctagtttcaagcaagaacccaattacaatagccaaattacaaagaaaatccaaaacgaaaattaaaatcagattaaggagagaaacaacctgatgatccaatgtatgcaatgcaaaaagaagttactagatcaggttaaatgaatgtaaatcaaatagcacaactttccttaatcttgaaatggttttcaagctccaagaatgagtcaaacactcatgatcaaagcacaatgaagcaagaaacaattaaacccttagaaaacactttagaatgctcacaaaactatttaagctcagaaaatacgtatgggtaatgttccacaaagttagaaaagcagctgagcatcagtcctatttataacagatttttgtaactgcctataatcgattaaacatgccaaataatcgattaaaacgctcatgtaattgattaaataaaccttgtaatcgattaaagtgttcaatatagtttctgggcatgagcaacgagcaaaataatcgattattccatcctgtaatcgattaagacagaagactcagaatgacaaaatacactgtgtaatcgattacaagaatgtggtaatcgattaaagcaggagtctttaaaaactggatgaactaagtaatcgattacgatatgtggtaatcgattaaaccaagaaaacttgtaagcattaacatacagtgtaatcgattacgaaatgtggtaatcgattaaagcagggagacgacttttccaattaagcctgtgtaatcgattacgatacattggtaatcgattatgccagcacaacttaaaatcatatatagctatgtaatcgattactacccattaataattgattaaagtgcttaacaaggcagtttatatgaaaacaaaggtcaaataatcgattattccgataggtaatcgattacattgttcttgaaagcttttccaaaatagactaagaacaaaataatcgattaagtctttaaggtaatcgattaaaccagtaggaaatgtatttttccaaaaacctttgaatcaaataaaaaacttagtcaaataactaaaaccttgtgatttttatgaaccaattaatttaattatggattaatatgaatgcaatgcacttggatcaccaaaattgcttttctcttacacaattcacagtaattaaacttcaatgcatcaattgcatgttgaaagctcaaaattcatgcttgaatcacaattcctttgcattctttaagtagctcccctgaatccaacaatctccccctttttggctttaaacatgccaaatttttaattgattaacagttggacttgaagttaattgatgaaccaaattgggaaaagcttgagctttacaaacctaaaaattttctaattcctttgccaagaacaagtgttaaaagcatctgtgattcatttagcattcatttacaaattacaagtattatagatttaatatattcattttaagcacttagctccccttgaatttcacaaaccattcaagtcatattttgaacataattttgaacgaaaaatagggatgaacagagtaggaggcagagcatgtccaaaataaattatttctccccctatttggcttgttaaagacaaaaatgtaaagtgcacaatggataagtaaaagagaaacacaattgatatatttatttagggaagaaccattacaagtaatgaaaattaagcatgatagtaaaataaaaacagagcataaaaaaaattcataggcctagaaggtttcagattcatcacattttatagtgtcctctatgatatctagcctatcttttatttcatttaaggctacactggtttcagccttaaattcttgttgcatttgaagtaagttatccatcttctgcaacataagggattcaaactgagtatacataggctgatttggatcccttccttcatcctcagcaaattctttttcttcttcaccagcagcagtaggagggggttgaggcactggtggttggcatgccatcacccatccttgtggtgttttcatcattccaagctttgtaagatgtttcttttggatgacgctgttactagagtttgtgtggtccataacttcattagaaacatcaatattgaagtgatctatgaacctagataccagaacaggatagggaaaaggatagttgactagcctcttagattttaacatgatttctttaaggattagaacccaattcatgggaatggagttcttcagaccatacaccagttgtaggtcttcatcagtggcttgggcatgattggttgccctaggggttaagacataggttataatgtaatgtaataacctatcttctaggttcattgacccagtacccaacctattcctaatttgcgtatggggatcatttagcatgtccatgtaggtatcaagtttgttgtaaccctcaggatcctcatcaaattttctcttaccctcacataaaaccccaactattgtttcccagcttcatgagtaatctccatagtgacatccttaactttagatttcatagtcccattcatggaacccttggcataggtatagaatgcctttaccagttcagggtagtatgtacccttcatctctaagaatctccttagaccttgggtctctagataagcggggaattgaaatccttcccttatgaaccagtttaggtcaaggtatttagctgagcacaatggttttgtggcattgaactgaagatagttcattttatcagactcatttgagaaccaaaggtcaagtctatttggagaaggaggaggaggaggattggaagaagattctcctaccttccttttagaagttctaacacgtttaggggtagacattttaggaggaacacaaggtttctagacactcagacacaagaaaacaaagaaatataacaagaaagataagagataatggtgcaaggtttttccttcgatgcaaggttctatttatagaccaaattgaggctcctaacgttctaattttcgaaaatatagttgttagaaggagttaaggcactgcagtgacattagattccaatttgatttggttgggcaattacaattccagagaaaaactgtcagatacgcaccaactaaataatcgattaaatgctcattgtaattgattattttgcatatttagaacactaaaataacacatggtaatcgattatcccgtaaggtaatcgattattttacaagcatccagaggttgaagatgaagtgtaattgattatatgcacatgtaatcgattatagtagagattttgtgagtcagacaggtatcagagcttatgtaattgattaattcaactcataatcgattactctagaaaagtttaacattttaaacacatatgtaatcgattaccattttgtcgtaatcgattattccagggggatttaaaaatttagaagcatatatttagtactataatcgattaccatttcatcataatcgattacttcagtgaagctttgagattgaaaaacacagtttgtacatggtaatcgattatcccgatgtgtaatcaattactccaggaagaataaatttttcaaaaacaaagaataatcgattattatattgctataatcgattagtgaagctcaaatagcataaacaatgtggattttaatgattatcatcgattaacccgtagtctaatcgattattacaaagaatttatcagattgcagggcattatgcagacctgcattcatattatatttctgtaatcgattactgaagctcaaatagcataaacaatgtggattttaatgattataatcgattaacccgtagtgtaatcgattattacatagaatttatcagattgtagggcattatgcagaccaattcgaatttttcaacaactttagtgatggagatagcaagggatttcaatttagcatggaaaggcatatattaaacaagctagtttatattggattcatcaagaatacctagcatgtttctaagtgcataaaacctatctctagccaaaggttttgtgaatatatcagccaattggttgtttgtatcaataaaatcaatcttgatattacctttctgcacatggtctcttagaaaatgatgtctaatttcaatgtgctttgtaacaccccaaatttttggaatcacagtcaaatattggggtaaaatgttaactagagacaatacagaaggatttaagggaaataacgaaaatactctgaacatttttggaaatgacgattttacccctggaaatgaggggcaaaattaccaaaatacccctgggtcaaaactgaccaagatgactttagaaaattgtgggaacctgagtatgggatagaatacctttagccaacacattattaacatgattggggtcagaaaatcctaaacagtaatttttaggaattttgggagatattctgaaaagagcttaatatagactaactcggacatcagaaaattataagaagagtgtaaacataatctatggagttttctcttaattatgagataaatagactaatttagtaagacggattagtaattttataaattaaaagtggaatggaccaataaggaaatagcttggtaccattacatgtagtaaaaaggaaaattttaaaaaaaagtttgctatacaaataaccttggccgtgtgatcaagaaagaaagaaaggaaaagcaagcaagtggcaagcttagaagaataattggaaacaaggagaatctcccataaatgttatataagataagaacaaagggagacaagaagaatatataataaatgcatcagagatatttaagcaaattttattttgtctactttggcagaacacgtagacacttataggccttatttcaaagatcccaacggtcaaaagctagatatttaagctagaaatatgcctttaaaattctaagaagatccaacggtgaaccaattcagagtgagtgttttattaatatgggtttttggagaaaaatcaataacctcttggcacacaataagcaagctacggttaagatgaagaaacaaatcaaggacagccttgaatggtgagggaccacgtgaagataaggaagtaagaaggagactaagtcaaataagtcaccaataggaagcaactaagtgaagcttaagtaaataattgaagggacaaagagaataaataataaatgcacgggaatctaaagaaaaccaacaaattggaagctatccacggatgaagtcacaaagtgagcatattggtgtcaaaaatgaagcaagaccgtggaggggtatggaccaataggaggagaataaaaaataaaccaaagaaaggtgctagaaaaggtagaaaagtctaatttccttttgattagttgattcaatagtggaaaagtccaacttaattctaattggctctccataagactttgaaaaatcaaaggatgccaaggagaggaaaaagctacggatgattacactccaattgggaaagcacgtggaaattgagagtttagaggagttaatgctttgtgtacttgaaagcttgcttggagggaggttattggctaaccaattaaagattaacatatgtaggaatgtcatagatttttagtgagaatgacacaagcttaagagctatataaaagtgggggaccggtgggcatataaagaaagctacggatgattaagtaaccaaagctttgtcattttcaaataaaattccaaacctttttcaaaccaaaaccaaagatagccgtgccattccaaggtcctacttgctttccaaaatccaactttctacatccttttcagacactatcaaactaaaagccacaacagcccatctttgggaggttcacgtgtgaggagcaaggaattttaaaaccaaggaagattaatacccaaagaaaaggtgagggaagtcttgataaactaaatttaagtatattcaaggctactacttaagactatttaggatgagttgagtagttaataggcaatggaaaaagaattaagaagggtgataagagattgatcttagtgaggaaataaataaattaaaccaagtaatttttataattttctatttgatgataaaaaattaggttaggtttcatgaattattttggtatatatgttccttaactcaatttatcttgtgatgtttctaactaaatttatttatcttgtgatgtttctaactaaattaatcttgcttattttctaactatatattttgttgttgaatctaggaccaagaagtgtaaaggaataattatggaatatgttatggaatatgttctttaagttatgttattatctaacctatttcttatgtatttatgttgttgttaatcatgggtcatataactttctaattttgttacaagtgaaagatttccaatgaaatttagtgatgatggccgtgtggtatcatttggccttgagaagtttgatgtgatgatttagaagtttgatgtgatgatgttgaatttgagatgaccctgtgatgatcttgggttggtgatgaccctgtgatgatattgagttgtgatgaaaatgatgatgaccttttgatgatatgaagttgtgatgaaaatgatgaaaaagaataatttacaagacgtaaaataaatcctgtctgcattttcatgtgcatatacccggtgggataagctttgagatgatgagacgataaatctcgtaaagaggtgtgtcagataactaaactgagtccatatgtttttaactaggggatagttgagccagtgaggaccacaccaccatgatgatcacatggatgggagtgataatcctacgcgccactgggctatccttatcgcatggataagttcgttccactgagggagggtggggttatctgacagtggccacaatttttgagacgttaagctgagatctcagtcatgcatcatataatgagatgagcatgcattttcttatgtgttgtgtgtgtaaaagagatgatttaattcatgtgtggagtaaaatatgattaacttttaataattgttataatatattctctgtgttagattacatttcataacaagcatgtagggaaaagatgatttaatacatgtgtggagtaaacgatgataattaaattttagtaaccgtggtattaaatcttctgtattattatataactagttacgtatatttaatattatgtatgtttatatttaaattttgtttatcatgacttaccctattttgtgtcttgtggttgacacctgtgatgaccccaaatgatttgggcgagcagaggaacagtgatatggatgttatactagaagatgtgatgaagctgttgtgatgattctctgcttttgatgatctatactttgatctgtatcatggactgtttatgtagtggactatggatgtatgattatggactgtatggtatatgtgtgaatgaacgtcatggactacgttaagaattatgcgtaaacttttatatttcttaaaaagcattttttaaacttaacaaatttaatttgagcctttattattattattattttaaaaaaaaagttagtcacaaatgaaaagcaaaagcaaaataagggcgatcgtttcaatttcaaataaaataaatacgtaacagaagcggttgtgacatgcttggtccttgagtgcataacaggattctttgagatatttatggcatttgtgttgtcacacagcaggggtatctcttttagttcaactccaaaatcttgcaattgttgtttcagccataagctttgtgcacaacaactcccagctgagatatattcagcttcaacagttgacaaagccacacaagattgtttcttgcaatgccaagatatgagtgaacctccaagaagatgacaagtgccagttgtgtttttcctatccaatttacatcctgcaaaatcagaatcagaaaattcaataatattgatttgtgcacccttaggataccatagcccaacttttggggttgccttgaggtacttgaggattcttttgactgctgtaaggtaagactcttttggatttgcttgatatcttacacacaagcaaacattaagcataatatcaggtctactagctgtcaaatacaataaagaaccaatcatccctctaaatttggattcatcaaatttctttcccttttcatttgaatcaaggtaggttgatgttgccattggagttgcagcagccttttatctcattcctatctagaagactaagtcagggcgagctcttacttagagagagttagttgggtagggtcaatagctcgaagatttttgcgtgataatccatttttttagagacacaacacccgacttttagcttagctccacgagaaccaagccactaagagatctctacatatagtaagaaagccagcacgttaggggtagattcctaggagattttgttggaaagcacggccaccattggccaagaccagaaactcgtagactacccttataagaatagatcttatcttagaacctgggcgccgaaattgtacgactgttccaggcgtacgacccgaatacgataaggttttttttctcttgctttcaagttctcttagtttctatgtaactcaatcaggatgtagatgtagatacggataagggtcaatcaggacgttacatatctgatacccttttgtccctcacggaacactggctatatcatctagccccatgtcaaccaatccaactcctcctgccgctatgcatcctattgggacgcttcgactttttgttctgtcaaggtctaatcgttctgacgtagtctaagtcttctagcctctgtcttaccgcggctgctggcacagagttagccgatgcttattccccggatactgtcattgcttcttctccgggaaaagaagttcatgacccatctttacttttctccatttcaaactttttgatgacttcaaggcaatattttgattgattaaggaaagtgccattcttcatttgtttcacttgaagtccaagaaagaatgtcaactctcccatcatagacatctcaaattcattttgcatagctacagaaaattctttacaaagtaattgattagttgaactaaaaataatatcattaacatatacttgaaccaatagaatatcatccttatgcctcttgatgaacaagattttatcaacattgcctcttatgaaagattgttcaagaagaaatttacttaacctttcataccatgatctaggagcttgttttagaccataaagggcatttttaagtttaaaaacatgttttagatatttgaaatcagtaaatccaggaggttggtcaacataaatatcctcctcaatatatctatttaaaaaggcacttttaacatccatttgataaagtttaaaacccattaaacatgcaaatgcaagcaatagccttatagcttccaatcttgcaactggagcataagtttcctcttagtcaatgccttcctcttggttggaacctttaacaaccaatctagccttgtttctttctatgattccactttcatcaagctggtttctaaaaacccatttagtaccaataggcttgaaagatgatggtctaggaacaagttcccaaacttcatttctcttgaattgatttagttcatcatgtaaggcttggttaatatccttaggttcaatttgagatataaaagccatatcacaacataaatttctcaatgatgatctagttgatactccctttgacacttcacctatgatgttgtcaagtgagagatctcttgttgttcttcattcttttggctcttaattaggtgttgatggatttgttacaacacttggttctcctttttcttcaataggctggacaatttcctccataggacctacatctaaattacatttcttttcctcacttgaggggttagattcatcacaaattacatgaacaaattcttccatgcacatagttcttttgttgaaaactctgtaagctttactttgtaatgaatatccaagaaatatagcttcatcagcctttgcatcaaactttccaagtgattctttcccattatttaacacaaaacacttgcagccaaaggttctcaagtgaaagatgtttggttttctacctttgtacaactcataaggggttttcttcaaaataggccttatgagtaatctattcaaagtataacaaattgtactaaccgcatcaacccaaaaatattttggcaaatttgtctcattaagaagtgttcttgcaccttcttcaagggatctatttttcctctccacaacaccattttgttgaggtgttcttggagctgtaaaattatggttaattccattttcttcacaaaacttttcaaaatgttcattttggaattccccaccatgatcacttcttattgagataattttgttgcttttctcattttgaacaactttggccaattttctaaaaacatagaaagcatcacttttggatttcaaaaacaaagtccaagtatatctagagtaatcatcaacaatcacaagtccataataattgccacccaaactcatagttctagaaggaccaaacaaatcaatgtgtagtaattcaagtggtctagaggtggaaacaatatttttgttttgaaaagagattttaatttgtttccccttttgacatgcatcacaaagtttgtccttttcaaatttgagttttggcaaaccaatcactaagtcctttttaataagcttgttcatatggtgcatgttgatgtgactagctctcctatgccacaaccaagattcattaacttactcattaagcatgaagttttgtgaaagaatgcatggtcaatagaaagttgatagatattacctttccttttgcctatatgaactacttcaccattttggcaattacatatcatacaacaattctcattgaatgaaatcttaaaaccttgtcacatagttggcttatgcttagaagattgtgcttcaaaccatccacatagagaacattgctaatcttggtattgaagctatttccaatgttgccttcaccaatgatcttacccttgttattatctccataagtgacaaagcctccatctttaggaacaagatttgtgagcaaagacttgtcacctgtcatatgtctagagcattcactatcaagatacaacaaagaagttcctgctcttagacatacctgaaaattcaaattaattcataaaagaaggtacccaattgaggttgggtccataggggttagtgactttctttctctttaacacccaaatgcactctccatttggcacatagaatcttcttgcaaagcatttataggatgtgtgtcttctctctatacaatagttgcaaataacagcccttggagattttctaaagaaagcattttgattgatccttgacttctttttatttttctgttttgggggcacaaatgttgtcttttggacagattttgaggttggtttataccccaatccagaagtatctccatcatatttttgtacactaagcatttcattgaaatcacattttcctttgtacaatttttgcaagagatcaatcaaattgctattctttgaaaggagctgcatatatttctcttcttgattgattctatactcatcaaagaccttttgcaacatatcatatttgtcaacatttgtagaagaagaagcacatacacaaccatttgatttgtagcttgaaacaagtttttcattttcttccttcaagttacaaatctcagcttgtagttcaataatcttagcaagatgatcttcaatactctttctaagcttattgttagattttgaaaggttttgtgcctctttgtgcatttcttgaaaagcaagaatagcttgatcaagttcagaatttacctcatcctcttcactcaagagatcatcatcatctttattgacaatggatgtaagacacatgtttgcttcctctatttcagtggaggattctgaacttgttgagtcattgtcttcccaagctatataagctcttctagactttccttctttattccctttgttgtccccttattgcttcttcaagtagattgagcattcaaacttgatgtggacaagtttcccactttcaaagtatgtaaagttgctatcaatcttcttgttgctgttgttgttgttgttgttgttgttgatgtttcttgagaatctttttcctttgttcttcttcaaaaacttgctaaactttttgactattaagttcatgttttcctcattttccttatcacttgaatcttcctctttatccactttagatgttgcagcttttagagcaattgctttgcctttcttatctgcatcttcaacacaagttaattgagacaattccaattcatattcaagtaacttaccaaagagtgcagccattgatattttggataaatccttggattctttgattgctgtcacctttggttgccaagatctagtgagacacttcaagatcttgatgtttagttcctcaacatcaaaagtctttccaagtcccaaaagatgattgacaatgtgtgtgaatcttgtttggagctgggaaatgctttcatttgtgttcatcttgaacatttcatactcatgaatcaatgaatgcttccttgatcttcttacttcttcagttctttcatgagtgatctctaacatcttccacatctccttagcacttgtgcacctaactgttatagagaattcatcagaggaaagtgcagaggttatcatgtttttggccttaaaatcatattgaacaaccattttttcagcatcagtcatcttatcccattctttgagaatcatgtcattaccaacagttttgatgggcaccacaagacctttctctattgcattccaaacacctgggtcatttgattgaataaagttcttcatcctatgtttccaaaaattgaaattctccccttcaaacaaaggaggtctatctaaagaagcatcttccttgaaagttatttgtgaggtattcatttttgaaaaaaaatagtgatcttgagtaactttcaagaactagctcttgattccaattgtaaagaatatgaatatctcacacttaaccaagaggggggtgaattggttaaaccttggtaaattaaaaatttctttaatcaaaatcagagttcctaggatctttatcacttttcaaaaccaagaaaccttattcaatcaagtagctcagccccaaggaattcaatggatcaaaactgactttgttggtcaagcaatttaatcaagaacacaatgaatataatgacttaagtaataaagaagcaagacacaatcagatttatactggttcacttcaacactagaagctacatccaattttcttccaaccaacactaggatagagttccactattataattttcagttcttacaatcaattacaatgtctccctttatcaaccctagataaagaacagaagtctaaaaccttattagattctaagagacaagaacctgacaacactactcagttcttccacctagagaaccccttctctagtttcaagcaagaacccaattacaatagccaaattacaaagaaaatccaaaacgaaaattaaaatcagattaaggagagaaacaacctgatgatccaatgtatgcaatgcaaaaagaagttaccagatcaggttgaatgaatgttaatcaaatagcacaactttccttaatcttgaaatggttttcaagctccaagaatgagtcaaacactcatgatcaaagcacaatgaagcaagaaacaattaaacccttagaaaacactttagaatgctcacaagactgtttaagctcagaaaatacgtataggtaatgttccacaaagttagaaaagcagttgagcattagtcctatttataacagatttttgtaactgcctacaatagattaaacacgccaaataattgatttaaacggttatgtaattgattaaataaaccttgcaatcgattaaagtgttcaatatagtttctgggcatgaacaacgagcaaaataatcgattattccatcctgtaatcgattaagacagaagactcagaatggcaaaatacaccgtgtaatcgattacaagaatgtggtaatcgattaaagcaggaatctttaaaaactgaatgaattaagtaatcgattatgatatgtggtaatcgattaaaccaggaaaacttgtaagcattaacatacagtgtaatcgattacgaaatgtggtaatcgattaaagcaggaagacgacttttccaattaagcctgtataatcgattacgatacattggtaatcgattatcccaacacaacttaaaattatatatagctatgtaatcaattactacccattaataatcgattaaagtgtttaacaaggcaatttatatgaaaacaaaggtcaaataatcaattattccgataggtaatcgattacgttgttcttgaaagcttttccaaaatagactaagaacaaaataatcgattaagtctttaaggtaattgattaaaccagtaggaaatgtatttttccaaaaacctttgaatcaaatcaaaaacttagtcaaataactaaatctttgtgatttttatgaacccaattaatttaattatggattaatatgaatgcaatgcacttggatcaccataattgcttttctcttacacaattcacactaattgaactttaaggcatcgattacatgttgaaagctcaaaactcatgcttgaatcacaattcctttgcattttttaagtagctcccctgaatcaaacacaatgccatttgttccccaacagatccacccacgacatcagctaaggcatcaccatgtctgcattccatgaggtccttaccttgtatctctatataagtagaagatgtcgtactagtcttattgagatcatcaatgcccttttccttatgattcaagactaggaacaagctttaggcaatagacatgtagtgtcctcgaatcctcatgatcatgatccctatcgtagatcctcaagtgtacacttgttcttttcctagggcctttatctttaaacacatattgttataaatataggatagacataaatatcataaagataaactttgcacttattaatcatgaaataataaatagtacaaggtgttcaactgataaatcagattgtctttaagacacctacatactaacagctagtgcacctcctgatgatctctcttggcaccagaaaatgaagtttttgaggaactctaaatactttgtgtgagatgattctcacctttttaagattggagcagataatctccttagaagatgtgtagcttagggggaggcaagaagcataatgtttcattgccatagttcaccttatggaggccattacaatggagagaggactgctgctaaggtcctccaatctggtttctattggcctactttgtgcaaggatgcttatgaatatgttcagaggtgtgaatcaaagaaaaggtggaatctcccaaaggaatgaaataccactgcaaagcattttggaggttgaagcttttgactaccgggggatagatttcattcgtccattccaatcatcttactcaaatgaatacattctattggttgtggactatgtaaccaaataggtggaagcaatagttgttcaacatgatgcaaagactgttattcacttcctaaagaaaaacatcttttcaaggtttgactcaccacgggtactgacaagtgatgaaggatctcatttctgtaatgtctaactcatgaaatttctccaacaatatagtgtcagacacaaggtagcctcatcttaccatccctagaccaatgggcaagctgaagtttctcaatcaaggaaggattggtctcaaaaattagatgaaactctgtgggcatacaaaatagcatacaaatgtgctatataactcactcccttccaattggtctatggcaaatcttgtcacttacttgttgagttggagcacaaagcttattgggagttgaagtttttgaattttgatttgaatgcagctggtgaacataagaagctctaacttcatgaattggaggaatttaggtttcaagcttatgaaaattccaagctttataagcaaagagttaaattttatcatgatgaatatagcttttgaaaagaaattttcattttggtcaataggttttgttatttaattctagattgagattgtttccaagtacgctggaatctaagtggtttgcaccattcataattgaaaacaatatgaacagacacaattaaccaagagagggggggtgaattggttaaaacagggtcttttaaaatttctttgaaacaagcagcggatttaggatcgtatcataaggacactcttttaaaacaaacttttagtcaatcaagactcacttgaaaagattatcctaaagactagcaatcaatgatagcaagagattaaaagaacaccaagaactatactggttcactcctcaacaagagaagccacacctagtttcttctaaccaaaccttggctagagttccactattaacaaaaatatgttctttacaagcttacaaaagatctccctttatcaaccctagataaataactgaaatctaaacgccctttagacctctaatgatcaagacagagaaacccttctatactcttccctctagagaaccctactctagacaagcttaaagaacccttttgtaatagcaactaacaagatataaatgtaaaaatgaattacaaccagagtttagtggagagatagaaccttatgatccaaagaatgaaaatgcatatgtttaccaatctggaatcaggttgaaagaaagcaagtttcagaccaagctctccaagaaactcctttgaaatcttgtccaaaaagaattcaatcaatgatgcatgaagatctttgaattatgggacaagagctttgttactcagtgtatattttctcaatttcagaaggcttttgaaaacagtgaaaattttgaattctgatatgttgtgcaaatcaaaagacctaacaactttttatagaaaactgtttcaactgaatgtgatcgattaaatcgtccatgtaatctattattttcacttaagtaaccgattaatatcatatttaattgattaaagtgttatttgttctttctggaaaagatacatgagcaaagtaatcgattaaaccgctgtataatcgattaccacagatagtctagtgttgtgcgaatataagtgtacggcaagtgcaccgatcgtttacaagtaataaagattaggtaagtgagtatcgttctccacagggattggggtaatttcacagtaatactaacgaatgtgattgaaattaaaacagaaaattacgcaagaattgtttgattgattggtttatttaatgcaaaaacagaacttaagtaaatgcagtaaataaatttaagaagttaccaatgaaagggtaattgtggtcaggcgcaatcccctcaaattcctactctttcacttgactggttatttaactttaatgtacacaaatgataaatctctcctagattcgtaaatcctagataactagcgatttcactctttaattcgatcgagaaccctaaacctttagcgattctgtcaaactaagcatttagagaataaatcataagaggttcttgttattaattgttcagagaataagtctttcctagattagctaatccctaattccttagtgaactaaccctttaacctgaatcgaaaacctaattccttagtgaaatctatcagttcaagcattcaaaagaacatatcataggctctgcagccacgcatccctattcctaggtgatgaacaactgttattctaaacggttcagaaattagaaccccaacgttcccattgccaatcctaaccctatgtacttaatcgaagtgatcaaattcaaataagaatagaaagaagtgcataatagaataaaacaattaaaacatatcattcaataccagtcaaattacagaggagttatcgtcggttcatagccttcccacaatataaggtttagccagccataggcctcaagaacatcaaagcagtaatatgattcattgttgtgcagaaactcagcttgatttcttgatttctagggttttagatgaagaatggatgaaaagatgtatattctggctattctggatgcctagactctgttcagaggcttaatatttatagaatcctttaattatagtaagaaagcctaattctatgcagaaattcgaacagatcttttaaataaggaaactaaatcactctggcgcgacccgcgcgcgatcccgtgctaaccgcgcggcttgttcgaaagtctggcgctgatcgcgtgaaactccacgctaactgcgtggattgttcgaatcaattggcttgctctggtcttttgtggcgctgttagcgcagatacggcgctgatggcgcggagctctcaaatagatgacgctaatcgcgtggatatggcgctactggggcgagttgttcgagttgaatgccctggcttgttgtccttgacgctaatggcgctgatggcgccatgcttgcggctaatccacgctaatcgcgtggcttctcacgctgattgcgtgagatcttcgagactatggccttcaatcctgcacttggcgcgatccgcgtggctactggcgctatccgcgcgggagttaaaaactctgttttcttctttttctttgccttgaactcctcttttggcctgaaaatgctcaattggtattgaattgaattaaaagcaataaagtaataaaattaactaattctaaactattttcctaattatttaactaaaatataacctaaaactagcctaaaactaggatgtgtttgcaacacatcaaacaattcccagatttgaaagttgttgtccccaacaacagagagaattcaagactaagcaagaatcaacaatcaaacacaaaccacagttgacaatcctagaataatcatgctatgtatgatcaattcaagtcaaagctagccatggcactttcaatactgtcaaacaatgagagcaacttgagtcttccttacagaattgtgtttagtcactcattcactcaagtgtttaggctataattaccctcttactcaacaaagtcacaacacgatcataaacttgaaaatattctcaacagtcacaaatatggcttgatcaaaaggtctttccagcttgtaacgtggctaggctaaaggtatgaattatttggataagtagcttagtgagaggctagatccaatcccttaagtccacaacatgcttcttgtcttctccttgttaaaaacctggtactttattcaacatttattccaatgttaaactaaataataaacttatttttgaattttgaaattttctctttttttctcttttttttttcttttttttttagaataaaacaattataaacataaacaatattcaaattactgcagcttcacaattttccaatcaaatggaattcttgttaatcaattggactatgcttgttcattgttgttcttcaccaccaattggattcacttgtgttccttggtattttgatggatgattccctgttttccactgttatagacttaattcaaccttctctagcctcagggatttggtcatttggatatagctcttaatttgggacattttgaaatgaaaggcttaggctcaaaataaggtgcaattggaaaataattgaaggtgagtcatttcggccctagtttcagaagaaaaatgtgccttaatcacatcaagtcatacctgcatctagagaaacaattcaagttctagagtaccatgaaatcggagtctctcggaaagaaaacattaccgctatttggctcaaatccttacaggtgttccaactcaagtcaatctccattgactgcatttcaagcatcatttcaacttcaacattcatttcacatatcaacaatcatattccattcatgctctgtttcatttcattaagcttcatatagaaattttatccatcactgtgttcatttacttttaattctgaaaaatttgatgagctgcttatttttgaaaaattttgacaaaattttgttagacgtcattgtttcttgattgtgatttgcaaaataatgcgtaaccattcccagatttatatgttgttgtccctagcaaccacaaataagatcaaagcgctttggaaaaatttgagcattattcggaaaatcgcattcaatctaacattgatctaaacagtgtattatttgaaagaaaataaatcgtaaactagatcatatatatataaagtgcagaagtgaaaagtgtgtataatgtaatgcagaatcataaactaaacataaaaaccagaaacataaacataaacaggactaaaacagaaaaataaagatgtcctgatcactcctctctactctctacaatcactgcagcctctgtagtctgtggggtgggctcatgaatgggtatctcggtgtctgcagcatctgaaatctgatgtggctcgtgtgtggtatcaactggaggagtaagaggatctgtgactggaggtgctggagtctctactggtgctaaggtagctgatggtatctgataatctgatggagagatgcccaagtgtctacagatggctcctagcatgctcgtctgctgtgcaagctaagtcctaacaaactcctggaacgccatgtatgaagcagaatcagttaaaagtggctcatgtccaggagtaggggctgaggaagatggtgctgcatgtgcgggtggtgaaggtggtgtatctgcgggctgctggacgggtgctgggatctctggtggtggtagatctctcggactgcgagtggcgatctcctcaggtttgagcttagaagctctaaaaacctgctcatctgtggcggaggccatggcgtccaaataagtcttgtagctcatcagtgaggatatcgggacatccatgggctcgtcatcatttatgtgtacgcctgcgtgtcaacacaaatgaagaatcagggaagggtgggctagccaggacttgctgctagcatcctggatcatatgcataatcctgttagacaggagggaagagataagaagattaccctcaccacggagggtagagtagaatggctctctctacattcacatccgtcatattagtagaaggtatgacggtgtgattaacaaactggtgccagaacaaagcattgcccaccaaatcatgcttccgcagcttctctggtatatagtctagcccagatttgggcttccatgctgtgtagaggcctgtgatggccctgcggatggtggtggcaagctggggaacatcgtcccagtacatcttcgtcaatgcatcaggctgcatgcgaaggaaaagctagaggaaatcgcattcctcgaaggggtcatagtgggtgtccaagatacgctctatggctcggtcatcaaaagagacctggacacccctcacccaagacatcctagtcctatagatggtatcatgatccacgttagcgagaaattccttgaggatcatgctggagctcggctctggaaagctaactagacgctgccactgtctcctgaggatgactgccctagctgggttatcttctggtagtgtgtcccataaaatcttcttctctaaaatgatcttcttcggtaggtaccatttatcgaacttctcttggcattcagctgtgcggaatcgaagctcatcaaactcggcgatcctagctcgcttcttgcctccttcagctgtggttttcttcttgcccttagctatttgtttgccctgaaatcagaaaaggattcaagtatatgtatataggttaagcattttgaattcccagatatgcttctttaattaattcagatcactaataaagcacaaacaatgaaatatgcacaagggacagtcaatagctcagcatttcagattaacatccaaacacaacagtggaatagcatcaattaaattaaattcagtcaccgtacatgagtttaggtacctgtatatggatttatattcacatgaaactattggtactatgaacaagtataattcagcagggatcatcaattggaattccagatttacaatttcattcaatttcagtccagaattcacaattcccagatttgttcttggctgtggtccaattaagttggttcaatgtgagcatggataagtaaatatggatgcattcaaatttaaagtccttatgagagagcataacagattcaggcatcaatcatcatacagataaaatctagtgtttatgttgtaattccaatgctttgcctgttttaattgagtgcagcatttagctcaaaattgttttattgaaaatcaagcgcaaccatcaataattgagcatgcaacttaatataattgttcaatgcagtccatattaacaattgacaggccaccattggctagttccaagttaaggccacatctctattcaaaatttatccaattttcacaaccactaacaataccattttaggtatctcatacctgttattacactttgtctatagtgttggctatgcatacatccaaatcaacaattgcaaggcctaatgtatacacttaatcacaaagaattcagacagttcatataacagttcaaattttgaactcatttgtgcctaccaaaagaactaagagcatagctccatcatgaaactcagcaaaactagcaaaacactagaatgagtaaaacaccaaacccatgtatcacttaccttgtgagcattctttggttgcatgggttttaactaaattcattaattatacaacataattacaatcaaactaatgtactagaccttatccattaaagccttatgcatattgaatcaatttttggcttcaatttattccaattccctttcaggcatttcatcaaacatgtgatgggtatataatcaaattaacattctatgcctatttggatcatatcacactcccaattaaacaaaaacaatgagaataccacaaattgcaacagcagcaggtctctatcctatggtttttcacaattttaatcaacagagaacatgagggtcccaagcattaccattggaacttgccatagcataccattattcattgcgaagcatataggctcaggaacttaccttatcaccggccattttgcagttcaaacttggccctaatgaaacaaatgtggatacctttttcagagaattttgagagtgaaaatgatgaaggttgtgaacggaagagataatgagaggggaaaggagaggtgttaggcttttaagaagaatgaatatggtgagagatatgtgggtgagtgattgaggaaggtgctggggtctgggcgaaatttagggaggaagtttaaggagtggggagtggggagtgaggcgcgaaatgggaagttttaaaataaaaattgattccgcgatgccgcgcggattgcgcgaaagccggcgcaaattgcgccatcagtactgaataggctttttggctcgaattgatcacgtgactagcgcggcatgtcacgcggaacgcgtgaataggaactgaaaggaccctctctctcgaatgattcgcgcggttggcgcgaagggtcacgcgattagcgcgagaccttaaattttggacatataactcgaatcattggcgctgctcgcgccatcttcacgtgattagcgtgatttaatgcagaaggacccaattggctcgagcaactcgcgctgccagcgcggtactcacacgactagcgtgtacaagtcgaggccttggcactgttggcgctacacctggcgcaaatcgcgccagttcgttcagatgtgggaatgtaactcgaacattccatgcggttagcacggatgtcacactattagcgtgaataagccgaatgtatggcgcggttagtgccactgctggcgcgattcgcgccaggctttttgcacagcttttctactcttgctatttgctttttaattcccactcctaattaaaatgaatagactaataaaaatgattataattgaacaaactaacctaatactaaagctattacaatttaaaataaaggaattacactatctaataatgcatgagataaatatcatgaatatgcagtggaacctctattgaattaattaccaaaatttaaactatgtagacttagagtcttagatctagaaatgcatgaatgatgtccataatttaagctactgctatcaaagatattggcatatctaactcttattgcagaattcgaaacaactactgcagaaatttaaacctaatgttatcaaatctaaacagaacataaatagaatcttaaatcagcaaatatgtacatcaaaacagtgctaatttaacgtcttaagctagacgcttacttctatttaacttcagtggtgttgagtggaacagaaactgaagttctgtccacttctcctccaaaatagtgttttaaacgataaccatttaccttgaaagctcggtcactatccaaaggcgatattgccattgtgccatagggaaaaacttctcgaacaaggaacggtccagaccaacgggattttaacttacccgaaaagagtcgcaggcgagagttgtataatagtacttgttggccaggaacaaactccttttgacggatttggttatcatgccacttctttgtcttctctttgtagattcgggcattctcacaagcagctaacatgaactcatctaattcattcaactgaagcaacctcttttcattagctttggttagttcaaaatttaaaaacttggttgcccaaagtgctttgtgttcaagttcaataggtaaatgacaagccttaccatagacaagctgaaacggggacatacctataggtgttttaaatgcagtcctgtatgcccacaaagcatcatctaatttcttagaccaatcctttctcgatgttccaactgttttctcaagtatgcgctttaattcacggttggagatctctacttggccacttgtttgagggtggtatggggttgccacattatgcttgactccatattttgttaacaagctgtcaaattgcttgttgcagaaatgagttcctccatcactaataatggctattggtaccccgaatcttgtgaagatattctttcttaggaatgagatcaccaccttggcatcatttgtgggtaaagaaactgcctcaacccacttggaaacgtaatccacagcaaccaagatgtattgattggcaaatgatttagggaagggccccatgaaatcaatgccccacacatcaaacagctctaattcttggatgttgttgagtggcatctcatctctgtgagatacattgcctgtcctttgacaattgtcacactgcatcacaaagttctttgagtccttgaatagtgttggccaataatagccacattgaagcactttgtgtgcagtccagtttgctccaaaatgtcctccatagttagaggaatgacaatgccacagaatattcggcacgtcacttttaactatgcatctgcggagaacattgtcagtgcattgaaaatataagtaagggttatcccagaaatacctcttggaatcatgcagaaatttcttcttctgctaccaattcagttcttcaggcactattctagcagctttgtaattagccattctagcaaaccatgggctggtgtttacagcaagcacttgctcatcaggaaagtattcatttatttcaatttccggtccatcttgtaagtccttttcttgaattctggacaaatggtctgcaaccttgttctctactccagctttgtctcttatttcaaggtcaaattcctgcaacaacaacatccaacgcagcaaacgaggttttgtatcttgtttatgcagcaaaaatttaagggctgcatggtcagtataaacaaccaccttagatcctactaaatacgatctaaatttatctaaggcatatataacagctagcatctctttctcagttgtggcataatttacttgtgcctcatttaagatcttactagcataataaatcacatgcaaacacttttctttccgctgtcctaatactgtacctactgcataatcactagcatcacacattaattcaaaaggtagactccaatccggagcaattaaaactggtgcagtggtgagtttttgctttagagtgttgaatgcactaaggcaagcatcatcaaatacaaactcagtttctttctctagcagctgacttaatggcttcgcaattttggagaaatccttgatgaaccttcggtaaaaacctgcatgtcctaaaaagctgcgaacaccactcacattaataggaggaggtaatttctcaattaacaaaagcttagctctatctacctcaattcccatttcagaaattttgtggcctagcactatgccttcccttaccatgaaatggcattcttctataggcgaacaccctaaatggacatgtaaaggctgtcttttcttgatcctctggtgccattgggatttggttatacccagagtaaccatcaaggaaacaataataatcatgaccagccaagcgttcaagcatttggtccatgaatggaagtggaaaatggtcttttctagttgcatcattaagccttaggtaatcgacacacattctccagcccgtgatggttcttgagggaattaagtcattgttgtcattttgaataactgtcatacctcccttctttggcacggtttggactggacttacccatggtgtgtctgatattgggtatatcattcccgcatctaaaagcttaacaacctcttttcttaccacttctttcattacaggattgagccttctttgtggttgccttacaggtttaacgtcagtttccattaaaattttatgagtacaaaaggagggatttatacctttgaggtctgaaatagaccaaccaatagctgacttatgctccttaagtaccttaagcaattttacctcttcatgccaatccagccctctgttgattatgactggatatgtttcattttcacctaggaagacatacttaagatgttccggtaattccttcaattcaaccttaggtgcaccggttgggatatcatcgtccttcatctcaagcttctccagcattggttctgctggtttttctgcagctattatgttggtttctgcagaaaatactgcagctgcataattccctgttgatgcctctgctgcataatttcctgctgctgctgaaattccttctgcactgcttgctgtaactgaattttctgctgcatatttttctgcataattgtttgctgcagcaatttctgctaagttctcatcttcagttgcttttacacctgctgtaatacctgcacaaatcacattatccaacacatctagcctaaaacaatcatgttcgtcagttggatgtttcatggcatcaaatacactaaatacaacagactcatcattcagtctcagctcaagttttccctgctcaacatctattaaggccctagcagtggctaggaaagaccttcctaaaagtaggggaatttcactttccccttccatgtctaatacaataaagtcagcaggaaatataaacttgtctaccttaactaaaacatcctcaatcaccccagagggggttctaatggacctatctgctaactgcaaggatactctagtgggtttaagttcagaaattcctagggacttacacatagataatggcatcaaatttatgctagcccctaaatcacaaagtgctctccctacattgatattacctatggctatagggatgttaaaacttccagggtctttcaatttgggtggaagcttcctttgtattattgcactacactcctcagtgagtgctatggtttcacaatctttcaacttatgtttcttagataagatttctttcatgaattttgcatagttgggcatattaactaatgcctcagcaaatggtatattaatgtgcaatttcttaaacatatctaagaacctggcaaattgttgcttctgcaattgctgctttgtttgcaccggatatggaggcttttcaaagcgagaaaagtcccacttctttggttgtggtgcagaatttttctcctcaaatttttctgcagctttttcctttgatgcttcagctgctgcagaatttttctcagcttcctttctacttacttcatgcctttccggtgtagtcaataccttaccgcttctggttgtgatggccttggcatgttctcttgggttaacgattgtgtcacttggaaattggccttgcggtctctcagctaattgttttgcaagatgaccaatttggttttccaagtttctaatggaagcatctcgattagtcctgtgagcccttatttcagatatgaaatccgctgttgtttttgacagctgcagcacaactttttccagctcggaaggttccttgttggggataggagggggctgcaaatagttgttggatttatagtccagaccacctccttggaatctcctttggccttggtagttatttccagcaggataattgttgttcctttgatagggctattgctggtatgattgttgctgcctttgatcattccaaacaccattttcctgcacagggtcagcaccaacaagaatggggcaaacattagattcatgctcaccttggcaatactcacagactatatggggttggctagctgccacttgtgctgcagaaacttgcaatctatcaatctactcggtcaatttggccaattgttgtgccagaatcttctgctctgcaagcattgcatcattagttgacagctgaattggttctctctttggttgatgtgtcatgctttcattctcattctgagccaaagagttaataagctcgtatgtttgagctgctgtcttggatcttatagtccctcctgctgcaacattaacaatcatacgagtgtcaggagtcataccattaaagaatatacgtacctgcttacctacaggcatatcatattatggacatcttctaattaactcttggaatctattccatgcagcgcatagggattctcttccattctgagtgaaattggtgatttcattcaccaaacggttatacttgtccatggaaaagtattcagcaaagaatctcgcaactaaatcctcccaagttgagatgctatttgatgtttggcggttcagccatctcaatgcgtttcccttgacagcaaagggaaaaagacttaatcttactgcatcatcggagactccttggtgtctaatagtatcacagattctaaggaatctgtctatgaaatcatgtgggtcttccgaatcatcccctccaaactgactgcgtttcaccaatgctattaaagaagggtttatgtcaaagtgattagcttgtattggtggcctcacaatgctggagttgggtcttgtgaacattggagccagaatatcctccataagttcatcttcgggcctctgctggttgtttctagcttcagccatattttcttctaattctgaatcggattccggaagtgaatcaaagtcaaaattttctgcttccctccttctttgatcagctagtcgccttcggagtgttctttctatttccggatcgaattgcaaatcctctgaactaactgaaccttgcataaaactaggagaagcgattagtaacaaaagtttcaatcacaaataataaaattactgtaaaatccgttaaccaattcccctgcaatggcgcaaaaaacttgttgtgcgattataagtgtacggcaagtgcaccgatcatttacaagtaataaagattaggtaagtgagtgtcgttctccacagggattggggtaattccacagtaatactaacgaatgtgattgaaattaaaacagaaaattacgcaagaatagtttgattgattggttgatttaatgcaaaaacagaacttaagtaaatgcagtaaataaatttaagaagttaccaatgaaaggataattgtggtcaggcgcaatcccctcaaattccctttcacttgactggttatttaactttaatgtacataaatgataaatctctcctagattcgtaaatcctagataactagcgatttcactctttaattcgatcgagaaccctaaacctttagcgattctgtcaaactaagcatttagagaataaatcataagaggttcttgttattaattgttcagagaacaagtctttcctagattagctaatccctaattccttagtgaactaaccctttaacctgaatcgaaaacctaattccttagtgaaatctatcagttcaagcattcaaaagaacatatcataggctctgcagccacgcatccctattcctaggtgatgaacaactgttattctaaacggttcacaaattagaaccccaacgttcccattgccaatcctaaccctatgtacttaatcgaagtgatcaaattcaaataagaatagaaagaagtgcagaatagaataaaacaattaaaacatatcattcaataccagtcaaattacagaggagttatcgtcggttcatagccttcccacaatataaggtttagccagccataggcctcaagaacatcaaagcagtaatatgattcattgttgtgcagaaactcagcttgatttcttgatttctagggttttagatgaagaatggatgaaaagctgtatattctggctattctggatgcctagactctgttcagaggcttaatatttatagaatcctttaattacagtaagaaagcctaattccatgtaaaaattcaaacagatcttttaaataaggaaactaaatcactctggcgcgacccgcacgcgatcccgcgctaaccgcgcggcttgttcgaaagtctggcgctgattacgtgaaactccacgctaactgcgtggagtgttcgaatcaattggcttgctctggtcttttgtggcgctgttagcgcagatacggcgctgatggcgcggagctctcaaatagatgacgctaatcgcgtggatatggcgctactggggcgagttgttcgagttgaatgccctggcttgttgtccttgacgctaatagcgcgggtctggcgctgatggcgccatgcttgtggctaatccacgctaatcgcgtggcttctcacgctgattgcgtgagatcttcgagactatggccttcaatcctgcacttggcgcgatccgcgcggctactagcactatccgcgcgggagttaaaaactttgttttcttctttttcttgccttgaactcctcttttggcctaaaagtgctcaattggtattgaattgaattaaaagcaataaagtaataaacttaactaattctaaaatattttcctaattatttaactaaaatataacctaaaactagcctaaaactaggatgtgtttgcaacacatcatctagcttaaaaaatgtgctaatgtgatcgattacgattatatggtaatcgattaactcaagaaaacttattctgtgttttgtactgtgtaattgattaccattacctcgtaatcgattaattagttctccatggcttaagtaacagattactatattctggtaatcgattaagtcagtgtaaaaagtggtttttccaaaacttaaccgtgagtactgttgcgaacacggcaagtgcaccgctcatttcaagtaataaaagtaggtaagtagagtatcgtctccacagggattggggtgaaattcacagtaatattatgtctaagttggaagtaaaaaggaaaagacaatatttttgaagaattgtttgttgagttgattgaatataaaactgaaattaaaataaatagtaaaataagttgaaatgttaccaatggaagagacaattgtggtcaggcacactcactaatgttccctacctctttcacttaactagtttattaagtttgatcactcaatgatacatctttccaagtttagtaaattctaattccttagcaatttaaccctttaacaataatcctaattccttagtgattcttgtcaagcttataaaagactatatcaaaggggttgctatttcctattgctcagagaataaatcttttctactttatttaatccctaatcccttagtgaattaaccctttaacctgaatcaaaaacccaatcccttggtgaattctatcaaattaagcatgtaaaagactatattataaggttcagcagccacgcatccctatccctaggtaatgaataattgttattttactaaggtcagaaattagaatcccaacgtccccattgcgaatcctaaccctcaatacctaaatagaatggccaattctaaataagaataaaacaataaagaatagagtaaaataaaacaatcaagaattctcattcaataccagtcaagttacagaggagtttacattagttcatggccttccaacaatacaaagtttagcctgccataggcttcaaagaaaccaaggctgtcaaataaaacatgattctgcagtgacctagccttgattcttgacttccaagggtttagaatgatggagagagtctagagagtccaggtagtgttctagagagtgtctttcttcagtccagaaggctttcttttatagatgaatttaattagagtaacaaagcctctttctgtgcccaattttgaactcaatctttttaaatcaggaaacagcgccttcacagcgcggctcgtgcgggttgcggcgctgatcgcgccagcagttcgaattcatggcgctgatggcgcgggtgtctgcgctaatcgcgcggatagcacgagttgaaaggctgatccaggcatctggcgcggatcgcgcgggatgtggcgctatccacgtggagcttacaaattgatgacgctattggcgtggatcctggcgctagtggcgcgactacttcgagttgaatgcctgtattttccatcatggcgcgactcgcgcggatgctggcgcgatccgcgcgggactttgaaccttgttttcttctttatatggttgaatctcctctttttggccctgaaaacacatattggtaataaaatgagctataatcaaatataattgacaaactagcctataactaatctaattcctaatgtgaaggaagtaccttaagttccaactttggttcttcttccttcatttcttcttttagttcttcaaagaggttttgatgaacaagaacttctttgcatgaatttaattgatgaagatactttgaggtgtcgtcatctccatcttcttcttgagtttcagttaaagctttctctaagccatctttcttgtgaaggaatcttctagagtcagcaataacttcatcgagaacatccactctaaaacattctttcttatctacagggtacttgatggcttcaagaacattaaactgaacttcatcatcatgaactttgacagtgagctttccctcatcaacatcaatcagcaccttggcagtctttataaaaggtctgcctagaatcaatggtacttcactgtcttcatccatatccatgactacaaagttgacgggaaagaagaatttgtcgaattttaccaacacatcttcaatgatgccataaggatgcttaatagatctatcagctaattgaagcgtcatcctggtaggcttaattacaacttctcctattgatgtgttgcaaacacatcttaattatagattagttttaggtcatattgttattaaatagttaggaaatagttctaaatttaatcatatttagtattttgcattataaaagcattttaataccatttaagcgtttgcaggtcaaaaagagggatttaaaggcaaagaacaaaggaaacaagatctggagcatcacgcgggtcgcgccacaattcacgcgatccacttggaagaccagagaagatcacgcgcgtcgcgccattattcaagtgagtcgcgtgggaacttcagtatctaagccatttcagttctgctggtccacgcgacacacttggtactccacgcgggtcgcgtcaatactcaaagaaataagcaattcttcactgacctttcacgcgaagcacttcaggttccacgcgacacgcgccaatcccttttgccagtccacgcgactcgcgtggcatcgcgcgcgagtcgcgtggttatgattttctttcctgaattaagaagatatatgtttcgaaaataggaaaagggttttgctttgttactgtaattaaaaatactcaatatataggagagttttctagacactcagacacacagaggcacatatagacacacttggatagaattacacatagaatagagagttttagtgagagcaaaccctaggaatcaagattggagtcaaagttctgcagaatcatgtttcatccaattgctttggtgttcttgaagcctatggctagctaatcatcttattgtggaaaggccatgaacttatgagtttccctctgtaaattgactggtattaaatgcatatgttttgtttattttaattcttttctgtgcttaatcataatcttgtttagaattgatcactctgaatgagtattgagagttatacttcgcaatggacacgttggaattataatatctgacttgttaagattaacacttgttcttcacctagacatagggatgcatgagtgcggaggttataatatgttctttaattgcttgaattgattagtttcactaagacattaggttacaaactcagttcaaaagggttaattcactaagacattagggattaactaaattagaaaagacttattctccgagtaaacatagcacgaacccataagatttgttctctgaattcttagtttgacagaatcgctagaaggttagggttctcgatcgaattaaagggttaaatcgctggttatgactctagtagttctaggatttacgaatataggagagatttatcttatgtaaacttcacgttagaatattcagtcaattgaaggaggtaatgcttataagggattgtgcctgaccacaattatttctcattggtaatttcttgatttaaaatttactgttttgttcaatttctcttctcacttcaacacaatcattcaattacttttgcgtacttttctgtttcttgttcaatcataattttcataattactacgaaatctttccaatccctgtggagacgatactctacttacactttattacttgttaaacgatcggtgcacttgccgtaaacatattcgcataaataccaacaacaagtttttggcgccgttgccggggattggtaacagatttttcagtaattgttaaattttgtgattgaacttttgctactaaccacttctcctagtttttatgcgaagttcagctagctctgaggaattagaattcaatcctgaaattgagagaacactccgaaggagattagctagacaaagaagacgagaagcggaactattcgactttgattcacttccagaatttgagtcggaagagatggctgaagaactacacaatcagcccccaccaaggctacggcctgaagatgaacttatggaggatattctggctcctatgttcacaagaccaaactctagtattgtgaggccaccaatccaagccaatcattttgatataaacccttcattgatatcattggtggagcgcagttagtttggaggagatgattcggaagaccctcatgacttcgtagacaaatttcttagaatctgtgatactattagacaccaaggagtctccgatgatgctgtgaggctaagtttattcccgtttgctgtgaaagacaatgctttgaggtggctgaattgtcaaacatccaacagtatagcaacttgggatgacttggtttcaagattttttgcagagtatttctatatggataaatacaatcgattggtgaatgaaatcaccaactttacgcaaagtggaagagaaactctatgcaccgcatggaagagattccaagcattagtaaggagatgccctcaatatgatatgcctgtaggtaaacaggttagaatatttttcaatggcatgactcctgagacaagaatgatggtaaacgttgcagccggtggtactataagatccaaaaccgccgcacaaacatatgagctgatcaaatctttggcaagaactgagaatgaaagccatacacttcagccaaagagggagcctattcagttaaatactaatgacgcaatgcttgcagagcaaaagcttttagcacagcaattggccaaattaaatgagaagatagaccgattgcaagtttctgcagcacaagtgggcacaagcaaaccgtatattgtgtgtgagtattgccaaggtgagcatgagtctaacacttgtcctattttagttggtgctgaccctgtgcaggtaaatggtgtttggaatgatcaaaggcagcaacaacaaccgtaccagcagcagccataccaaaggaacaataattatgcagctggaactaactatcagagaagatttcaaggaggtggtttggattataagtccaacaactacttgcaaccccctcctattcccaacaaagaaccatccgagctggaaaaagtggtgatgcagctaactaagaccatcacggaatttattgctgaaacaagggcccaccggaccaatcaagatgcttctatcagaaatttggaaaaccaaattggccaacttgcaaaacaaatggctgagaggtcacaaggtcaatttccaagtgatacggttgtgaacccaagagaacatgctaaagccatcacaaccagaagcggtaaagtattagtaactccggagaagcctgaatcaagtattcaagaggtggagcaaaattctgcagcaactgaaaaagataaggaaaaagttgcagaaaatttggaggagaaagatcatatgcctccaccaaagaaatgggatttttcacgctttgaaaaacccccatatcctatattgaccaagcaacaagagcaaaagagacagtttttaagatttttagagatgttcaagaagttgcacatcaacataccgttcgcggaggcattagctaacatgccaaactatgctaaattcatgaaggaactcatatccaacaagaaaaagctgaaggaatgtgaaacaatagcaataacggaggagtgtagcgcaatcattcaaagaaaacttcctcctaaattgagagatccagggagttttaatattcctatagctattggtaatattgatgtaggtaaagcattatgtgacttaggggctagtataaatctaatgccattatctatgtgtaagtccttaggcataactgaacttaaaccaactagattgtctctgcaattagcagataggtctttaaggacaccctccggggtaatagaagatgttctagtaaaggtagataagtttatatttcctgcagatttcattgtgcttgatatggaaggggaaagtgaaattcccctacttttaggaagatctttcctagccaccgctagggccttgatagatgttgagcaaggcaaattagaattaaggttggataatgagtctgtggtttttagtgtgtttgatgcaatgaaacatcctaatgatgaacatgactgttttcgtatagatgtattggatgatgtgatctctgcaggttttgaagcaagtgttgcagcacttaataagaaagattcaacacaagatgcagctagcactacacatgcagaaaaatcaccaacaaaaacacaagaacaactgcagaaacttacagacacggctgctggaatttatgcaaaaaattctgcagaggaggattttgaaaccacctatgaagtggaagaaaaagctgtagtaaccaattctaataacgcagaaacaccagcagaaccaaaaatagaagagctggaagtcaaagaagatgacatcctttccggtgcacccaaagttgagcttaaagagttaccggaacatttaaagtatgtattccttgaagagcatgaaacttatccagtaataattaacaaaggactggattggcatgaagaagtcaaattgattaaagtgctgaaggaacacaagtccgctattggttggtctatttcataccttaaaggtataaacccttccttttgcactcataaaattttaatggacactgacgtgaaacctgtaagacaacctcaaagaaggcttaatcctgtaatgaaagaagtggtaagaaaggaggttgttaagcttttggatgcaggtatgatctatccaatttctgatacaccatgggtaagtccagtccaagttgttccgaagaaaggtggaatgaccgtgatacaaaacgagaagaatgaattgattccatcaaggacaatcacgggctggagaatgtgtgtagattaccgaaggcttaatgatgcaactcgtaaagatcacttcccacttccattcatggaccaaatgcttgaacgtttagccggtcatgactactactgcttccttgacggttattctggatataaccaaattccagttgcaccggaagatcaagaaaagaccgcatttacctgtccattcggagtatttgcctatcggaggatgccattcgggttatgcaatgcacccgcaacgttccaaaggtgcatgctttctattttttcaaacatggtagaaagaggcctagaggtatttatggatgatttctctgtttttgggccatgtttcgatacatgtttaactaatttagctaaagtattaaagagatgccaagaaactaatttagtcttaaattgggaaaaatgccattttatggttagagaaggtatagtccttggacacaaaatttctgaaatgggactagaggtagatagagctaaacttttacttattgagaaattacctcccccgattaacgtgaatggtgttcgtagttttcttggccatgcaggattttatcgtcggttcatcaaagacttctcaaaaattgcaaaaccactgagtcaattgctggaaaaagatgcagaatttgggtttaatgatgcatgtcttaatgcatttaacgttttaaaacaaaaactcaccactgcaccagttataacagctccggattggagtttaccttttgaattaatgtgtgatgctagtgattatgcagtaggtgctgttttaggacaaagaaaggaaaagaaattgcatgtcatttactatgctagtaaagttctgaatgaagcacaaattaactatgcaaccactgaaaaagaaatgctagctgtagtttatgctttagataagtttagatcttatttagtagggtctaaagtaattatttatactgaccatgcagctcttaaatttttactgcataaacaagatgcaaagcctcgtttgttgcgatggatgttactcttgcaggaatttgatctggaaattagagataaagctggagtggagaacaaagttgcagatcacctatctagaatccagcataaggaactgcaagatggaccagagttagagatcaatgaagttttccctgatgagcaaatatttgctgttggagttactccatggtttgctgagatggcaaactataaagctgctaaaatcatccctgaaacattcacgtggcagcagaggaagaagtttctgattgactctaagaggtatctgtgggataatccttacttatactttaattgtgctgacaatattatccgtaggtgtgtagctgaaagtgaaatgccggatattctttggcactgccattcatccaactacggaggacattttggtgttaaccggacggcacaaaagatcttacaatgtggctattattggccaactatatttaaggatgcaaaggattttgtgcaacaatgtgatagctgtcaacgaaccgggaatgtgtctcgcagagatgagatgcctttgaacaacatacaagaagtagaattatttgatgtatggggtattgacttcatgggaccatttcctaagtcatttggtaaccaatatatactagttgttgtggactatgtgtctaagtgggttgaagcaactgcattaaccacaaatgatgctaaggtggtgataaactttctaagaaagtatatttttacacgatttggtgtaccaagagcgataataagtgatggaggaacgcatttctgcaacaagcaacttgaaagcttgttagctaaatatggagtgaaacacaaggtagcaaccccataccaccctcaaactagtggtcaagttgagatatccaacagggagctaaagcgaatcctagagaaaaccgttggaacatcaaggaaggactggtccaagaagttggacgatgccttgtgggcgtatagaaccgcatttaagaccccaattggtatgtctccttttcaactcctctatggtaagtcttgtcatttaccacttgaacttgaacataaagctttatgggcaaccaaatttttaaattttgaactaaccaaagctaatgaaaagcggttgttacagttaaatgaattagatgagttcaggttaaaggcttatgagaatgcccgaatttacaaggagaaaacgaaaaagtggcatgacaaacacatcaaacataaggaatttgttccgggccaacaagtgctgctctataactcccgactgaaactttttccgggtaaattgaagtcaagatggtctggaccatttctggtaagagaagtttttccttatggcacagtagcaatttcagccttggatagtgataaggtatttaaggtaaatggatataggctgaaacattactttggaggtaaagtggacaggaattcaagttctgtaccactccaagctaacactgaatgaattgccgtaaaggtctagcttaaggacgttaaacaagcaatggattctgtatataagcttaaattcagttgatagtagtagatttcaattcatgcaatttattcatgcaattttaagttcatgcatcataactaattttaagttcatttcaattttgcttaaataagtaatagaattagtttagttatttcatttaggagtagttaagtaattttagtcattaggttagagaagtgaagagtaggaggaaaatatcaaggtaatcagaaaaggcaagtcacgcgactcgcgtaggaatccacgcacatcgcgccatacatactgtccatccacgcgacttgcgtggaaaccaagtgactcgcgtcatctgcaaccaacagcatttattgtctgcataaattcacgcgactcgcgtggaaatcaagtgtatcgcgccataaggcagtgcctaaaaagcactaatccacgcaacccacttggtaactgacgcgatacgcgtcacatatagaaactcaacagacaaataagcttaacccacacgacatgcgtggcaaaccaagtgactcgcgtgaagatccagaatcaaaaagcccgatctcacgcgagtcgcgtgaaatccgcgcgactcacttgaaatagccaaattctttactggagtatggcgtgacacacttcataagtggcgcgggtcgcgtgagtgcgcgggaaccgtttttaaaatagaatcccaaaactcgcaccctttaatcccactctccccaaatcaactcccccaacttcctcaacctccctaaacctcctccaacttccgaaacttcttctcccaatccctcactctttaaaaacccacattgtctctccatctcatatctcctgcattcgttctgttcgtgcatcttccctgcattcatctacttcaattgactaatggccaaggacaaggtaagcctaaactctggaacaccttagggtagccacatttttgattttgatataaatgattatctccttatcctctcttcttgtctatggtctgattaattaagaaaaattttggattttgccatgcccccaacacacatatcacccacattcatttttatgcacaccacatgtttgataaaatgtctgaatgagaatttgaatgaaataggcaccgaaatgaactccttaggcataagatttgaatcaagaagaatgactgatgtgaatacaaattaatacccagtttggtttacaattgtgattatcatatgctaggtgattatggaaaagtcataagtccggggatgattgggaatgagttaagtctctaataatagagacacttaaacttcaaaataattccacattatgaaaatttgaaatcatgtttactcgaatgtggttattgtagtatacatttggagcaatttggatgtgggtgcatacatgatgaaaattaaaatgaaactggaatgatatgtgtgcattgaattatgaataaaaattgttaatggctaagttgaaattgatgaactgtgaagattcttaatgtgcagattgatgtctacatgtagaaatctaataagtctgatattatgtttgcgcataaagttcaatataaattgttgcataaggcttgatgatatgtgaattgatactccaagtacatgattgctatgaattgtactcaccataatacgaggggtataagactagaatgatcactagtgtgtattaagtacttacactatattggcttcaaggtaataatgaaatgttgttaaatcactaatccaagacgtcttaaccaacttaagtcaccatagcaaaaacctaaatctgggaatgggataaatttattcaaaactggattattcactggtatgattaaaataataaaacaattaaatatgctaggatttcagttttggtgacttgagtccactgagttattgatcttatgaaaagactaagcagatatgctgataggtggatgtcataagctggaattgtacagagaggtcaatatgattatacctgtttaataaaagggattagatgacattgctaagaccaccaaaagtataaaatctgggaattgttgtctggaatgaaattgaaactgaatgacacagatatgagttgatgtaagtgtagttatcattgagccgttgagctataaattggattatttgattatgtattgaatggggttgacaataacctgtgaatggggattacacacttggtttcctgttgcttactaagtcactcccattaaagaatataaatctgggaatttttcaattgtttaacagatacacatatttgaaaatttttacttttcagggcaaacaggttgaacaggccaaagcagtacaaaaaggaaagaagaaagctacaggggaaagtagcaagaagcgggctagagtgtccgaatatgacgaactacgcttccgcaatgctgaatgccaggccaagtttgattcttggtacttacccaagaagatcatcagagagcggaagattatgtgggaagaattccctgaggacaaccccattagacaggtcatcctccgcaggcggtggcagagacttgtgatcttcccagagcccagctccagcatgatcctgaaggagtttttgtccaacgtggatcacgacaccgtataccgcactaggagctcttgggttagaggagttacagtcccttttggagagaagactattgagagcctgcttgacactgactatgacccctactcggcatgcgatttcatcaggttattttggcatatgcaaccggacgccgtaaccaagatgtataatgatgacgtcccggagcttgctaccaccatccgccgcgctatcacaggtctgtacacagcttggcagaccaaacccagccttgactacataccagagaaattaaagaagtctgagttggtaggagatgccgctttttggcatctgtttataaaccacacggttatgccatcgagaaacataaccgatgtgaacgtagagcgcgccattctcctatacatcctacgtggggcaggtaaccttctcatttcatcagttttatctgataggatcctgcagatgacccaggacgccggcagcaggtcttggattggacattcttctctcattcttcttctttgtcagcacgcgggggtacccattgacgaggacgaggacatggacgtcccgatagcgccacttatggtctataagacctatactactgccatgagcgctgcagcagacgagcaggtagtcagagcttcaaagctcacacctgaggcaattgccgatgcttctcctcgagaccttccggttgatgacccccagcatgaccagtcagatcctacaccaccagtctcacccatcccacagacagcaccaccatcaccaccacctacttctatgccaccaccatccactgtacccacacgcactccactctacgaggactctccgagtttacttgatttccagcagtttgtgaggactcagctggaatttcagagtgcacagttggcattgcagacacgcatgtggggagctgtatgccagcatttaggcattgacccttcagagtaccagacttcagctccagcacatccaccacagccacctcagccagttgtcgaccacaccgatccgatagatcagacatcggatgcggacacagatgcgatcattcggccagagactgcagctgaggagaccacacaggatcgagatgcagccgaatgatcaggatttattatatttttagtttcagacttttgtttttggattattttttattattctgcattacatacattttattttctgcacatttacatttcatttacatttctattactgatactttgatagtactgcattatatatatagtacagtttatgggttataatttttcttattaaatctgttttgacgaatgtgaattgaatgtgattttccgaataatgcttcaaaattttccaaagctctatgaccatgtttgtggttgctggggacagcaacatataaatctgggaatggttacgcattatttcgcaaatcacaatcaagaatcaaaggaagtctaacagaactttttgaaaatttttatataatcagaattcttcaaacattttcttaaaaataagcagcacacaaaactttttcagatcaagaaagcgaatgaacttaataatagatggatttctctgaattaagttggatgaaataagagacatggactgcataatgcatgagtagaatttgattgatagtatgagaaactcatgttgaatgttgaaatgatgccagatatgcagttgattgagaatgacttgagttacagcacctgtaagattttgggccaaattcggtaaattttcttctgagagactccatgctttatggtattctagaacttgacttgtttctctaagtgcaggtatgacttgaaatgattaaggcatgatttgttctgaaaactagggccaaattgacttacccaagtaaaattttcctttgaacctgaattttgagcttaaacctttcatttcaataacccaaattaagccatgtccaaatgactgaatccttttgaggcttaagaaggtgaactaagtccataacagaaaaatgctattgaccaaggaatgaaggacaagaagagaaatcaaatgaataagaagaagaagttagaatgcatcagctgaaaaatgtgaaaagctgcaataatttagtatattctgattacaaaatatttgataagaaaaattgaaaaagcaaaaagaaagtagtattatgttattttatgcttagaataaaagagattgaataaaagtaccagtttgaaccagagaagacaagaagattggaagaccacaatacgcttggacttagggaaccagacttagcctctgattgagctactttcctaaaatgattcccacccttagccaagccacgttacaagcctgaaaagaccttctgatcaagtcatgcttgcaactaatgagaatatcttcaagcctatggtaatgctatgatcatgttgagtaagagggtaattataacctgaaacacctgagtgaatgagtgattataaacacatctttgaggtaaactcaagtagtttcttattttgacagcaatgaaagcatcatggaagatttaactgagtcaattatacattcatgatgattttatgattgtgaattgtggtttttgttaattgttaattcatgcttatgtcttagaattctttctattgctgagggcagcaactttcaaatctgggaattgtttgatgtgttgcaaacacatcttaattatagattagttttaggtcatattgttattaaatagttaggaaatagttctaaatttaatcatatttagtattttgcattataaaagcattttaataccatttaagcgtttgcaggtcaaaaagagggatttaaaggcaaagaacaaaggaaacaagatctggagcatcacgcgggtcgcgccacaattcacgcgatccacttggaagaccagagaagatcacgcgcgtcgcgccattattcaagtgagtcgcgtgggaacttcagtatctaagccatttcagttctgctggtccacgcgacacacttggtactccacgcgggtcgcgtcaatactcaaagaaataagcaattcttcactgacctttcacgcgaagcacttcaggttccacgcgacacacgccaatcccttttgccagtccacgcgactcgcgtggcatcgcgcgcgagtcgcgtggttatgattttctttcctgaattaagaagatatatgtttcgaaaataggaaaagggttttgctttgttactgtaattaaaaatactcaatatataggagagttttctagacactcagacacacagaggcacatatagacacacttggatagaattacacatagaatagagagttttagtgagagcaaaccctaggaatcaagattggagtcaaagttctgtagaatcatgtttcatccaattgctttggtgttcttgaagcctatggctagctaatcatcttattgtggaaaggccatgaacttatgagtttccctctgtaaattgactggtattaaatgcatatgttttgtttattttaattcttttctgtgcttaatcataatcttgtttagaattgatcactctgaatgagtattgagagttatacttcgcaatggacacgttggaattataatatctgacttgttaagattaacacttgttcttcacctagacatagggatgcatgagtgcggaggttataatatgttctttaattgcttgaattgattagtttcactaagacattaggttacaaactcagttcaaaagggttaattcactaagacattagggattaactaaattagaaaagacttattctccgagtaaacatagcacgaacccataagatttgttctctgaattcttagtttgacagaatcgctagaaggttagggttctcgatcgaattaaagggttaaatcgctggttatgactctagtagttctaggatttacgaatataggagagatttatcttatgtaaacttcacgttagaatattcagtcaattgaaggaggtaatgcttataagggattgtgcctgaccacaattatttctcattggtaatttcttgatttaaaatttactgttttgttcaatttctcttctcacttcaacacaatcattcaattacttttgcgtacttttctgtttcttgttcaatcataattttcataattactacgaaatctttccaatccctgtggagacgatactctacttacactttattacttgttaaacgatcggtgcacttgccgtaaacatattcgcataaataccaacaacacctatcctcttaaccatggataatggtgtgaggttgatgctggcacctaagtcaagaagagatcttcccacagataaattaccaatagtaacaggaattgtaaagctacctggatctctagacttttctgggagagtcttttggatgatggaactgcatcctgcatccagctcgattgtctcctcgtcaatgtatcttcttttttggtgaggagatccttcataaacttggcgtatgttggcatctgctccaatgcctcagcaaaagggatatttatttgaaattgcttgaagatgtcaaggaaacgttccctttcctttgacttcttagatgaagtgtgtggatatggcatgtgttggactggtggtgggtttaaggctgctttgcttttttttcttttcatcctctcttgtcacttttctctcaattttttcgttagtttcctcctcatctttttctttttccacttcatcatttttctctacatttttcttttcttcctcattcctacccattactgttccccttctagtgataattgctttacactattctttgggattgatttgggtatttgctgagaaagatccacctccattgtcagctaactgcttagcaagctgccccacttgtacttctaaattcttgatagaagcttcggtgttcttttgattggtgatggacatctgcataaattgtgtaagggtgtcttccatctttgtcaatctatcggactgagcttgctgtggtggatttctatttgaaggacctgcaaaaggagggttagcgggaacataagcattattattttgcctccaattgtaaggttgattagaacctggaccactgcgatatccttggtaattcccttgataacttggttgaggtcttgcttgattttgcatgtaatgtgcttcctcttcttgtgaacaatcaccaggggctgtgcaatggccattctgatggtctcctccgcaaaaatcacatctcagaatttgaacttgatgggctgaatgagatttctgtgggcttccttgctgaagttgaggaatttggcctatttattttgttaaggcctctaattgctaggtcaagagcttgttttaagtcaagatggcattttgagtgtcaagctctagtactcctttcctctgaattggtgatctatcatggtgagattgatagtcacttgctgctatggaatcaatgatcactcttgccttgtcggcactgactcctcttcacaatcgaacccgtcaactctttccaccatattttgtaacctctgttccaactgggccattcgctgagtttcagcacgtttccattttcattatgctcctccatttgacgagttatcatccgaatatcctcctgtctctgaagggcttgtctcatttccatgctctcaatccgacttagaattgaactgagagcattgctgacgaaccgctctcccagctcctcctctgcactggaatctccctccgttgcttggtcgggacaggtgaagaagctgcatcagaaactgcttccgtcacgtgtacttcttcgcgctgcaccacatttcgattctcccgtattaagatctccctgtttggcatctcggaacgtggtattgactgactgtttcttgtattcaccattgttggatcgtgggactcgaaatttatcgttccccacagacgacgccgatgttctgtatatttctagaactcgattgtacagcactaataggctgaatgtttgctcttggatcagattccaactcttctacttcagaaatatcaatggagaatgatatcctgaagcagatgatcatagagagatacaccaatggacgtggggtgtgtgctctgtgtaattgaaagagatagagttagaatgtgtgtgtacctttctggcagtcatcaccatgtatttataggcaacctaccttgcagttgctgcacgaactgcttccgggaatatcggattccattcacacatctcaaccgcctctgttgactcagttaagcccacgttcaatgaagagtggaacgcacaataataataattgggccttatcactaagcccaattgttactaccacaacaaaaacaatacgaatgatgcattgttggtaccaaataacctcatattgatgtgcaacaatatgcaacaaaagaccattagaaaactattaaagtgcaaaacatatttttttgcgttttcaaacactttttcaagtctttttaaactgagttgagatgtgaaacttataccattaaatttatttacatgaaaactatcgaacttaactatttttcaaaccataaaatatcatcaacattaaaaaaaaagcacgaaagtcatccccatcaataacatttatactaaatttttaaaattagttcactaagtcaattttcacaattaaaaaactaaaatgaatgttttcaaatgtataaaacaaaacaaaaatatattacaaaaaaataagaaaaaaatattattctaattaattttttaatattaaaaaacatgtatagaattcaatttttgccaatcgaattcttaatattgcaatattaaaaaaccctagtatgaattcaggtccccccaatcaaattcacaccttaaaaaatggatattttggtgcataatttagaaagaggggtttttgggaatataattattgaatggggtggcacaatagtaaaaatctacatttagaataatgtttattttgattttatcagtttcatagttgcagtagattttttttaggtactttttgagttacgaatatgcatttttacaattattgaagtttcacttcattatacattatttatgcatatatattattgggtttgaatgtaattaagaatatattgttcttaattattaagcatattaaacaagttgcaaatttattaattacaaaaaacgtacaaaacagatagttgaatttaatttaacgaccaaaattgtgactagtttttattagatttcctagaaaaagcacacaagtcttacatttgtttatcgaacaacaactattttttatataaaataaagatttataatcatttatttatttcaccaaccaaaatagttcagtcgttatacaaccaccaaaaaagcaaccgacattattatgtgaaggtaccatctatcccataaataaaatcagcaaccaaattagagagagaaaaatcattagccaccagactagagaaaaaaagcattagtgaccgatattgctcaatcactacacatccaccaaaacattgattaacagttttttaatcttttttaaaaatcattttaaataaatcttagcaactgaattagagacagaaaatctcgatggcagagttggtcccttgacaataaaagcgaccaaatcaccaatgacatattattttttaatagcaactggatatatttgttacaatgcagtaatcaaaataatttcgcacataaagctgatgaattatctgtatttttgggtgtaccactttttggtcgcttttgtatactaaattattttcgtggttgatctaaatagcaagcattattctcaatatagaaactgatttcattggctgctaaataacatattctagtagtattaatttttaagttttaacatgattattgaaatttaaatttttaatattcatatttattaaaaataactttcaaaaacctaaaaatttaaattaatctactataaaaatttcaatacaaccaaaatataattcctttcaataatgtacaacgaaatcatatttctattgtatattgtacaatagaaatatgtttccatggtacatcattaaatggactcatattttttgttgaaataaaaaggggtaaaacaatatgtagcaagaatatgactttgttgtttaaataaataacatcgtatttttatgacatactttttcacccctaacattgtatcaaaaatatggttatgttgtataaaatatacaacataatcaaatttatgtcaaaagagtattttgggaatattttgttttaaataaataaataaaaaaacagacttgagtccattaatgggctaaaaggtactagtagtaggctagtagtccaatgtggctaacaaaaaaaaaaccaaaagtcttacatttgtttggccttcatgaaataatttcagcccgagaagaaaataaaaggatgaactaattaagcacagttatgtatcacccaatgacttgacaacatctcacttcaaatgcttttgctcatttttctcttcatatttcttcgttttttatagcagatcgagcttgagtcaccttttatagacttcagagagacaaaaatgaatttacgaaagttgagtttgtgtacttccctttgtagtaacatggatttcagtacattgttcatacttaatataaaacagtttgtgtaagtgaataagttcattagacacaagtaaaaagaacacggtgtataaatactgattttcacaaagagtggatgctagcttgtaacaatgtgttgggcgttgaatattactctttaataaaccaagttccacttatgaatggatgcgtacaaataagagttgtaggatgttaaataattaccatgtgtgctcatatgtagtaagtgaataagttcaatggacacaagtaaaaagagcatggtgtataaatactgattttcacaaaaagtggatgctagtttgtaacaatgtgttgggcgttagatattactctttaataaaccaagttccacttatgaatggatgcatgctaataagagttgtaggatgttaaataattaccatgtgtgctcatatgtagtaagtgaataagttcattgggcgcaagtaaaagagcacgatgtataaatattgattttcacaaaaagtggatgctaatttgtaacaatgcattgggtgttagatattactctttaataacccaagttccacttatgaatggatgcgtactaataagagttgtaggatgttaaataattaccatgtgtgctcatatgtaataagtcctattcacttaaaagtaactcattagtccatcagcaatttatatctttgtaatcatcaaaatcaaggacaagaatagatcgtccaattgtgacaatggacaattaacctagtcacgcccatgactgtgacccatgagattttttatttcaattttttattttgttgtcttttgggcatgaactctatttaagccatagctttaaataaggatttttcttgtcctagtctagggttccatacttttatgagttgagagagataaagaaatacaagatgtggtgatgattttggatgtgtttggattcatcgccattgttcctacatcaaaagcttctcccacatggctatgagtagctaactgttctctttcgttggggtttaatgtaactgatccaactttcatgctattccttcattgtttatttaataaagcactgtaattgttcttcttccattcttagtgcttgtttttggcatgatatacctatttacaagattctatgattctaaatgtaattgaaaaattctaattgtaattgaaaagttcctttggatgcaaactaaagaagacaactaattttctttatgtcaagggataggataatttaatcctcaataaaccctttttcttaatgcaaatcgtttggttatggtaatttaagcgattaatggtataatcaagggatataggtcctctcgctgaaggaactaaggttgtgataaaattgtgagttgatgataacataagcttaattgaaaaggaatatatagtgattgcatgttaggaagtccaatgaagttaaacccaattatttctctcattgaaattactccaattttctaagcatatcaagtgttcaagaaaattcacaaatcaaatttcttcccattttactctttacatttatgcatatgtatttaaatttgttactttgatcatcttaatattcatagtgtacaaattttacttttaatcacccaattattgcacaagtccctttggagacaactttacttatcactattgttacttgagcaattttatactcttgccaaaatcccaacactaagccatgattcttcttaataattcttttgggcctattattctaggccttttcctttggtggtcccatctattcctaaattgtaaatttgctgcatttctaggaatagagctcacacgtaaaataaaatgaattcaaaccatttttaagatgctcgggttgtggatcctcattgtagttcacacctaaattaactaggtccagtgtcagtccaatcctaaagaaaggaaagcccttgctttaggccccccaaaagtaattacttaacattagtaatgcatacaattatcaaaattccataattattcattaattttaaggcttaattcctaatttggtcccttaatttatttaaagtgcttaattaggtcccttagtttttgagtatgcaattgggtcccttagttttttaattttgcccaactgggtccttgtcgatatatccttcaagtatgtagataaacctgccacacatggccatctccatcttcatgtgttccatcctcaaaaactcatctcccaaaaccttaattgcagccatgatttttttattcgtacaagaaaagtgacacgtttccgcaacaacttgcggaaaaaacatcaaacaacaatacccatgaaaaaggtttctgcttcagagtccaaaatccagtagcatcatcgtcccatgttagaagcaagtcatccacactattctactctccattgaattgtagcaaacatcgttttgacaagcttgagacatcttttgggtccacttcaagcatattctaaattgactggttttgattcaaatatgggctgaattttgattcccaaccttcgcaaacaccttggaggcaaatgcaggctttgcaacacccatcctagtggaaatcgaatcctaaacccaccaatagcaccaccaccatcgaaacccaaaaagtctttgctataaaacttgttcaagctcttggtgtggtcattgtcgttgatctcatggtagaggagatcatcgttgtcatcatcattatcatatcagaatcttttttgggtttaataggggaggggcctttctccatggagtccatgatcttgaagtggacccaataggagttgaatcaggaaatggggaaagagggagcacattgggtctcgatacgataatgcttacgaagcttctccattttgtagcagcatagaatggggattttgggtggggggcattggggcagtggctagcaatggtgtccactacctcctgcccatgggtggccttgagtttgtcatggccaagggtttcatagagggaccaatagggcgaagggaggccgtgagtggagggggaattcaatttcccaaaatcaataaatgacgacatataacaattctatccacatacttaaagaacttgacgacaaggatccaattggataaaaaagtatacaatcacaaacacatgattttctcctactatgattttcatccttccactgaaattgataaaaaaaaaagttccctaatgctatctttcaattcttatactatatatatatatatatatatatatatatatatatatatatatatattaaacaataacagtaatatataaaaaaataactttttattgatttataactatatataaaaggaaataagatgttttggtgtacacattttatgtccattttatctctaattacattcataaattattattttattcctataactaccttcacaccatccactaacttcaattatttttctttttatttaaaaaaatatgaaaaaaaacagttaagcacagagtgcttatttttccctaatactaaataataacggccacatgtaaaaatataactgcctcatataaataaattatgactttgttctattttccatgcatagattttacatggcctatcaatcccattaatttctatcactacatgtaatgttggggcaaaatatcagcttgatccttacaaatatcttccgagttgaacaaagtgcctagtcaaggcatctgtgatcttgaaaatctctcattggattcttaatgaagatatgaaccatttactcagaatgacctttgtaatttttgctttttctaaccatgatattattagtgaattgacattactagcgtacgtgtgaactttgatgctttctattctgcttgttccatcattgcgtgccctacgattccttcttgtcacaattttttaattgaacatgttttatagataaccgtccaatattgtttacaggttccagtggatgacgatgttgatgatattagactgatgttgctttagcaaagttattatttcatttaaactaaaacaagacaaaaggaatagataaataaggcgtcactaggaaacaattcttaggtcaaaagacttttacgcactttttcatgggacttcggaaccacttgcacctggcttagttagacctattggaaagaagcctctttacatgtcacaagcttcactcagaattaattataatacaaataacttcctgaaaaaaaaaaaaagattaatcaccagcaagaatcactaacttaataaatgatcgatttcccaataaattgaaggaccattcaatttggataacacacaagtatcagttttatcccaacaaatcaaaatgcaactataagaaagtaaaaaaaaaaaaaaaaactatttattactttatcttcacttgaaaaattaattggttatttgttcccatgaagctaatccaaacatactgtttgttcgattttatagtttatttctatttatttatatatggctaaagtattacatattgtcgttggattccctgctcaatgggtaattttgggataaaattcttgtaccctgctggtcaaaggattgtggtaaagtggaagccaattgaagtatgtatattcactgatttccaggatatggctggtagtggctttcaaatgatggatagaagaggcctagatacacgagcatgctcttgtctatgagctgtggggcagcgacgtatcataacaagaaactttccgcaagcatgttgaatggtttaatttgtcttgggctccacaagacattgaaaattgcttgtgcatggcctaatttattgcaatcatcaaccaacatcacaaaaagttatttaattttgtagttaaaataatcaagtgattgaaaaaataattaatatactaaaattaaggttaaattgtacgttataatattatttagatttgatctttaataaaaaataatttttaatcaaattttatttattttaattaaattttatattaatcaaaatctttttcctaagttaaaataatttttcatgtgatgtatttatattttctttaatttggtagtgttctgtcttttacgaacaggtatgtccagcaaggatactagtgattttagtattggatcaagctatctcctaaagtatttatgaaagagaaataactcaaaaaatatgatcactatgcacaaagcaatactcaaccagtggcatgagatgtgtgcatagtgttaatggaaaagagaaaagagaatgagtgggtgtgtaccttttttctctaaaagcatcctttatttatactagacttacctctaggtctgttgaggagtctcttcgatatgcttggccaatatctctaaccgcctaatatcaatatcttcttggcagttattatgtttagggtccacgatcttctctgttgttatattcagcaattcaaagttttgaattcttgatgggccttaacattgagcccatatgtcgaatccgtaacaattgtccctcagcccggttgtcaaggtttctagacagccgggatgtactaagttatgtcatccttttcggcaatttggaaaattaatgctcttttatgaccgactattaattgtcgtatattgaagtattctttatttcaccccggccatccttatccgagttctacttcgtatcgaatcacttccttaccattactggggtgccaccacatactatccttccgggtttagatggtcgattcatttctatgcttctaacatctagaatagggaacgtctctgtaaaataacgtcatcatgtcttgtccttaactgtagcacacagtctgcacatttaatgcaccatcacttcattacacgccttaatcatcacatttgaatgtatttatctattttgccccgaactattgaatggatttgactcatttgcccctacgcgatgtttcgtgcctgccagttatgctactacaccgtttcgtgtcttcgacggttacattttcttctttatatctctcaagggttgcattttctctctatttctctcaagtttcctctgcattctctgcatttgtgcgttctttcctctattgttcatcacctttcgccaccaaattcttgaagacttctctcataccaggtatctttgttaccataaacttcctttttccgtttatagttccatcatatattataattttgttctttcttcttatcatcgttctgatcgtgcatcatctttgtcattttcgtgttatttcctctagttcctgggtttctgtccttgattcattttctctattcatcactcttgcaatttctttttatccacctgcgtgaaattctatttcatctatttaaaatgaaactcgctcccgaagaagaaacacatctgcgcaaaacagtcccccgcaagactggatactggctctttggtcttcccatttcagaagaataaaagaaaaaagacttcttgtgttctccttctggtggttctaataccacgaagaaaactaaagtttctaaacccaatattccacttggtgccacagcaaaaccaatccagatctaagtctaggaattcctctgaaagtccttccctttcaactttgtgtcctgcaccacaaactccgtcctcgcctttagaacaagataattccttagattgcttattcgaaacctagtttgatccgtgcgttgactgtattaatgaaagtccatatcttataaagtccgggttcgattcgagggatgattcaatgcttgaatcatgttggcacaactaggttcttatccccaaaccgaaacttgcacaacaaagtgaggcgcttgtgcagagaatgcctatttcttctaatgcaagtggtcctacagaagccgtccctatcccggatgacgctttaatcaactcttctgctcatatgaccttcaggtatgttttactgattcttatctcttttacgtaggtatttatggatccatcgtcatcagaactagttgctgagtctctcaatctactgggtcacattcagactgtccctcttccattctagttgctaaatttctgtgggtcacccatgaagtgctacataccagttctgatttacaaccgggaagtattgttgcgctctcggttggaaatcaggatggtttttgtgtctgcgaccctgactcggacaaacctatttgttctacccgggaagggaatgaacgcaattttttctttttctacaaagatgtaactacccgtctaggaatttgtttccccctttcggactttcagatgcaaaaatcaccttcatgtagctccctcacaacttcatccaaacagttggggctttatcaaatcttttgaacttttttgtcaacatttaaaaattccttgtattgttcgtctcttcttttattatatcaccgtacataccggtaggacgggtagagaaccccttagcaaaaaaggatggatttccattcgggatcgttcaaactgtagacttttcacggtctatactaaatcatttaaaaactttaaaaataaatacttcaaggttattgccgaacccggcaaacaacctttcactttctttcttctccagagtcgcgggacgcggagtggaagtttccgctctattggacccgcacccatcacgactttccaccctattcttacagtttcaaagagagggatttgccatattccgaggcttccttagtgacccagatcgcggcatatacagaagcttatagccagccaagtgttgcttcttatattcgccattatcagtccgggttctctactgaattaagtacgaacatgtctgactttgatttgtgatgtataacttaatcttctctaactgtttatttttattttgtagttgatgatatgggaccacaaccgccatcctccactaaaccaaagcaagttgcttctactgcgaccccagctacgagctctcctgcttcggcaaaggtcacttcaaccacccccgctgctggaccaggaaagccaacccctttcgcctcagcagccgggcgccctaaccccccaaagtggccacaacctcagccttttcttgccattttaggagtaggaaaaggaaaaaaatgcaaggttgcccaaccagcacagttggaagtaactccaacaaacaccaataacccggcaccttcttctcaaccgggaactgctacacccaatcttccctctccactccttggttcttttgctcatacttcctccactaatgcttcctggtcgtcagcaggatgcctttgggggaaagtagttaatgtcgttaaggctcccaaacacttcttggattcgagtctcctgtcgcacagtaaccttgaagagctcgattgtattgaagagaacgccttcaaatgtgttgccttggtgcaaaatgttggacgagctccaagcatcgcgggaggagacccgaaaaacccatgaggagctccttgcttcacaggatattattgcctccctacgccaagagctccgagcttccttggatactgctgaaattgctcaattagctttagaaacagctcggaagaagaattgatgagaatccccttgccttgatacaattttcggaccaattctaggttggaattcgcgcaccaacagagccagaatcgtattgttaactttcatgtatttctcggcgtctttttagctctagctcttgtcatgggtcctcctatgccttgtattggatcttggtcttggggttggtctttgatgctgggttgacctttgatgtcctcatcaagaatgcacttctgactcagcattttaatgaactgaaatctctcttggataaatcagaattggaatgcaaagaggctaaatccaggttgcataaggccgagttggagtattcaaaggttgaatctaagttgtaggttgccgagacggatactattatggtgagggaggcattggctacggcggtggagggatccttcaaaaataacttagaccaaatacgttgtttgaacctgaggattgaactaaataccacgggcatgcatttcaaagcctacgtggataatggtaaattagtccctccttctccccatgaagatttcgtagtccaaatggatgaggctccagctcagggagaagaggtgacttctacccaacaagctgatattcaagttcaatccccggcagcataggtgtttaaaggaccaggatgctggtttaacttttaattttccttttatttcaatgctttttaaacattaccgggttgatcccgattttatttgtaattgacacaatttctttttattcacgtattaacccttttttataatccaaatacgcatgaatccatactaatccaaattcttatcaaattatttggccaaaagcaacaatatccttcgcatgctgaataaatattcgtttggtttcaatgaccaagtattttatagtatagattattcttttctgtaacacgttccgggttgtgcttcccggacttaatcctgataacgattaacatgctacatgtagacatttactttatcattaaatggtcctacatttcaacctgatcagggtttaaatagtgcgtcgtttgttgccaatataataataactacgatgcatcgtgtatgcacaagtccttattagtttgtacgtaactgtacatagataagtctgtgatctcatcataaagataagaatatttatttataaacttcataaaacgattctcgatcgaattacaaaacaactcatgatctcaatgaaagagaacaatatcaatttcgggttaaaaacttgtcgtaccacagcttatactcttaataaaagagaaacacatgaattatgaattacattgttaattccgacaaaggaaaaaaatacttattatgccatgctcacgagttattgctccttccaatagaacatcgaacccggatttaactataatatattttcagtttatccacattccaagttcattttattgctctttcatcgagggtttccaatatataagctccttgtcagagtgtttgtgaaacccggtatagtccttcccagttgactgctaactttccttcttgagcgtgtttgtttccaatatccacccttcgaagcactaggtcgccttttccaaaatgtcgcggcttgactttcttattatacttcacggctgctagttgttttgctaataaatcctgacaatgtgcattaacccggatctcatctatcaaattcaactcaatggccaacgcgtcattgttctttccttcgccctcctggagtacttgctttcttctccaagataattggtcaatctctactagtattattgtttcgcaaccataggtcattctgaatgaagtttctttggtagacttttgagccgtagttctgtgtccccataaaacataatatagttgctccacccaactagagttggcttcgtacatctgatttttcaacccatctacgatcaccttatttgctgcttgataagtgccctaattcagttaaattcatgtttcaaatgtaggcacttatcctttaatttcagaagatttgattataaatttgccataaacctagttaaatagcacctagcgcttgtataaaagttgttgttcatattttggaagattaatccaatcatgctttgtattttgatagatttcatggatttccaaaactttcgaataagcaaagcaagcaagaagggctcaaaagattaaacctgggaggtgttacaagcaaacaggcccacaattcatccaagcccaaggctttcttcagagttaaggctttaacttgcccagccgaccatttccagtgtatttggctcgcccagtcgagcaccaagctccaaggagatagacattagcttgcccaggcgagcaaacaaaggcaaaatcactcgcctgggcaagtgaagctggcaggaggaagatttctataaatagccaacgaaaatggaggagaaagcatgccatttgcttcattcttgcttcctttgttgttccttaggcttaggagcttaaatattagtaagtaggtagattaggaaagtgacagaagtgaggattagtgtggagactctgtcgaagagaggcggtgatggggcccttcagcaattcttcccgtgaggaggttctctctactatgagtaactagcttctctgaggattggatgtaatcttcttgaccctatgcatctcttttaatatttatttatgcatgaatagtttctattccttgttggtcattgcattctgtgtttaatgcttgattttacttgatcactagtttcatgaatttaatcctaagtgagactggaaagtaatcttagggtttgaaccgaatgattttactcattacgttacattgctaggaataagtcataacgttctgattgcattaaacacacaattataattcttaatgctagggtatttacttcatatgcgaggaatcgatattcggtagatatccttagaacttgaatgcgagggatcgattcggggtaaaatagtgtgcatcaaaaaggataggcgatgatttatgcttggtaatattaattggatataaaaggataagaatgatgaaacccaatcccactttctcatagatatatttcatttactaaagtttagtaattttacattactttcacaactaaatgaaatttcacttaacctacttctacataactattgaactgtcgaattatattttgattaactgagtagctcaagtccctgtggagacgatctttataaattttgtaacttaaaacgaaaaattggtgcgcttgccgagagtcctaacaagtttctggcgccgttgccggggacttgagtcgctccctcggttctttcaaattaatttctcaattaaataggactttttctttacttctattattttttattttgtataaattcttttttgttttattttatttactttccctaacctcggtacttacaaattattgcaagtttgttctttttcctttttggggtaaatttcttgcagctacatcgatatttaatttagaaattaccaagaccacaaaggaaaagaaacgaaacaaccaaagagctatcgagtaaatcttcttctattttgattctccttcattagtaaagccacctctaaatatggataatagagggggagaggaaaatagacaaccatggaggactcttggtgactatgcgtatgaacaaggaccaaagcattacagcaacatagtcattcctcctttcagtaaaaaggttatggaattgaagcctgcattgctcagtttgattggatcacatcctttttctggaatggatcatgaagatccatacactcatttgtccaccttcatggaactgtgcagtaccatgggagcctctgatgcagatgctgaagctatctatctcagagcttttccgttctccttgacaagtaaggcaaaggtatggcttcaatcctaccctaacaaaagtcttagcacttgggaagaaatagaggaaatatttattgccagattctttcctccatctagattcataaatgcaaagtcagcaattgctactttttcccaagggtttaatgaacctctctgtgaaacatgggagagattcaaatctttactgcgtaggtgtccaaaccataactttgatgatattgcacagttacatattttctacagcggtttgagacctcagacaaagatgattcttgatgccttagctggaggtgccatgatgtcaaagagcccggaggaagcaattgtaatcgttgactccatagcagccagtgattaccagtctcaccatgatagatctccgatgcaaaaaaaaggtataatggagctgcatactcagaatgcaattctagctcagaacaagctcttgacacaattgttggattcagggggagctacttaaagaatgaaaaggaattgtgatttaagcatgagttttcagctttcaacatgcaatggatgccttgaagtttaattggtgtaaaatgtgtaagagaaaagaaattctggtgatccaagtgcattgcattcatattaatctataattaaattaattaggttcatgaaaatcacaaggctttagttattagactaagtttttaatttgattcaaagtgtttttggaaaatgcattttatactgttgtaatcgattaccttaaagacttaatcaattattttgttcttaatctattttgcaaaagctttcaagaacaatgtaatcgattacctatcgggataatcgatcatttgacctttgttttcatataaattgccttgttgaacacttgaatcgattattaataggtagtaatcaattacttagctatatatgatttcaagttgtcctgggataatcgattaccaatgtatcgtaatcgattacacaggcttaattggaaaagccgtctccctgctttaatcgattaccaaatttcgtaatcgattacactacatgttaatgcttacaagtcttcctggtttaatcgattaccacacattgtaatcgattacatagttcattcaatttttgaagactcctgctttaatcgtttaccacattcttgcaatcgattacagtgtattttgtcattctgatgagtcttctgtcttaatcgattacaggacggaataatcgattattttgctcgttgcccatgcccaggaactatgttgaacactttaatcgattacaaggtttatttaatcgattacatgagtgttttaatcaattattaggcgtgttaaatcgattacaggcagttacaaaaagctgttataaataggactgatgctcagctgcttttctaacttggtggaacattacccatatgtattttctgagcttaaacaatcttgtgagcattctaaagtgttttctaagggtttaatcatttcttgctccattgtgctttgatcatgggtgtttgactcattcttagagtttgaaaaccatttcaagattaagaaaagttgtgctaattgatttgtaatcattcaatctgatctggtaattcatcttgcattgcatacattggatcatcaggttgtttctctccttaatctgattgtaattttcgttttggattttctttgtaatttggctattgtaattgggttcttgcttgaaactagagaaaggggttctctaggttaaagaactgagtagtgttctcagattcttgtctcttagaatctaatagggttttagatttctgttctttatctagggttgataaagggagacattgtaattgattgtaagaactgaaaattataataatggaactctaacctagtgttggttggaagaaaaactggatgtagcttctagtgttgaagtgaaccagtataaatctgattgtgttttgcttctctattctttaactcttatattcattatcttagcttcagttttgatccattgaattccttggggctgagatacttgattgaataaggtttcttggttttgaaaagtgataaagatcctaggaactctgattttgattaaagaaatttttaatttaccaaggtttaaccaattcacccccctcttggttaagtgtgagatattcatattctttacaattggcatcaagagctggttcttgaaagttactcaagatcacttttttttcaaaaatgaatacctcacaaataactttcaaggaaggtgcttctttaaacagacctcctttgtttgaaggggagaatttcagtttttggaaaaataggatgaagatctttattcaatctaatgacccaggtgcttggaatgcaattgagaaaggtcctgtggtgcccatcaaaactgttggtaatgacatgattcccaaagaatgggatgagatgactgatgctgaaaaaagggttgttcaatatgattttaaggccaaaacatgataacctctgcactttcctctgatgaattctttagaacagtcaggtgcagaagtgctaaggagatgtgggagatgttagagatcactcatgaaggaactaaagaagtaagaagatcaaggaagcattcattgattcatgagtatgaaatgttcaagatgaacacaaatgaaagcatttcccagctcaaacaagattcacacacatagtcaatcatcttttgggacttgaaaagatttttgatgttgaggaactaaacatcaaggtcttgaaatgtctcactagatcttggcaaccaaaggtgacagcaatcaaagaatccaaggatttatccaaaatgtcaatggctgcactctttggtaagttacttgaatatgaattggaattgtctcaattaacttgtgttgaagatgcaaataagaaaggcaaaagaattgctctaaaagctgcaacatctaaagtggagaaagaggaagattcaagtgatgaggaagatgatgaaaacatgaatttaatagtcaaaaagttcagtaagtttttgaagaagaacaaaggcaaatgattctcaagaaacatcaaaaacaacaacaacaacaacaacaagattgatagcaactttacatgctttgaatgtgggaaacatggccacatcaagtctgaatgctcaatctacttgaagaatcaacaaggggacagcaaagggaagaaagaaggaaagtctaaaagagcttatatagcttgggaagacaatgactcaacaagttcagaatcctccattgaaatagaggaagcaaacatgtgtcttacatccattgtcaatgaagatgatgatgatctcttgaatgaagaggatggggtaaattctgaacttgatcaaactattcttgcttttcaagaaatgcacaaagaggcacaaaagctttcaaaatcttaacaataagcttcgaaagaatattgaagatcatcttgctaagattattgaactacaagctgagatttgtaacttgaaggaagaaaatgaaaaacttgtttcaagctacaaatcaaatggttgtgtatgtgcttcttcttcttctacaattgttgacaaatatgatatgttgcaaaaggtctttgatgagtatagaatcaatcaagaagagaaatataagcacctcctttcaaagaataacaatttgattgatctcttgcaaaaattgtacaaaggaaaatttgatttcaatgaaatgcttagtgtacaaaaatatgttggagatacttctggattagggtacaaaccaaactcaaaatctgtccaaaagacaacatttgtgcccccaaaacagaaaaataaaaggaagtcaaggatcaatcaaaatgctttctttagaaaatctccaagggttgttatttgcaactattgtatggagagaggacacgcatcctataaatgctttgcaagaagattctatgtgccaaatggagagtgcatttgggtggaaaagagaaagaaagtcactaacccctatggacccaacctcaactgggtaccttcttttatgaattaatttgatttttcaggtatgtctaagagcaagaacttctttgtggtatcttgatagtggatgctctagacatatgacaggtgacaagtctttgctcacaaatcttgttcctaaagatggaggctttgtcacttatggagataacaacaagggtaagatcattggtgaaggcaacattggaaatagcttcaataccaatattagcaatgttctctatgtggatggtttgaagcacaatcttctaagcataagccaactatgtgacaaaggttttaagatctcattcaatgagaattgttgtatgatatgtgatggctaaaatggtgaagtagttcatataggcaaaaggaaaggtaatatctatcaactttctattgaccatgcattctttcacaaaacttcatgcttaatgagtaagttagatgaatcttggttgtggcataggagagctagtcacatcaacatgcaccatatgaacaagcttattaaaaaggacttagtgattggtttgccaaaactcaaatttgaaaaggacaaactttgtgatgcatgtcaaaagggcaaacaaactaaaatctcttttcaaagcaaaaatattgtttccacctctagaccacttgaattactacacattgatttgtttggtccttttagaactatgagtttgggtggcaattattatgtgattgttgatgattactctagatatacttggactttgtttttgaaattcaaaagtgatgatttccatgcttttagaaaattggccaaagttattcaaaatgagaaaagcaacaaaattatctcaataagaagtgatcaagatggggaattccaaaaagaacattttgaaaagttttgtgaagaaaatggaattaaccacaatttttcagctccaagaacaccttaacaaaatggtgttgtggagaggaaaaatagatccctttaaggaggtgcaagaacacttcttaatgagacaaatttgccaaaatgtttttgggctgatgcggttagtacagtttgctatactttgaatagacttctcataaggcctattttgaataaaaccccttatgagctgtacaaaggtagaaaaccaaacatttctcacttgagaacctttggctgcaagtgttttgtgttaaataatgggaaaaatcacttggaaagtttgatgcaaaggctgatgaagctatttcttggatattcattacaaagtaaatcttatagagttttcaacaaaagaactatgtgcatggaagaatttgtttcatgtaatttgtgatgaatctaacccctcaagaggaaaagaaatgtgatttagatgcaggtcctatggaagaaattgtccagcctattgaagaaaaaggagaaccaagtgctgcaacaaatccatcaacacctaatcaagagccaaaagaatggagaacaacaagagatctctcacttgacaagatcataggtgaagtgtcaaagggagtatcaactagatcatcattgagaaatttatgttgtgatatggcttttgtatctcaaattgaacctaaggatattcaccaagccttacatgatgaacattgtgaaaaacaaaggaacacttcaaacaaccaagagggggggtgaattggttgaaaacttatccaattataatttatatcagagttatataccacaggatctttatcacaattaaaccaattttcagaaacagaacaaatttcaatatcaaaatcagttttcaatcaacttccccttttatgagcaacagaaaacagagtattacaaatctgagcaatgatattgattcacaaacaaagtaatacgaaaacgatctgaaagaatagagagaactcacagatttttatactggttcacctcaaacactgtgaggctacatccagttctccaactcaacactagagaggagttccactattgcaataatatctttacaagcaatattacaagtctctttccttcaaccctagaagaaattcagaaatctaaaaccctattagattcttagagacaaacccttcaccctgagaaccctactcaggtgaatcctagagaaaccctatctttatgcttgaaagaaacaaattacaacagaaatacttttaccaaattacaaagaaattgatttacacaatcaaaagccaagaaaagatatcacctgataatccataattgaatgaatatgaatgattaacagatgaatacgcagattatcaccacagatatgcagcttttcttgtgacttgattgcaagaagaaacttcagctcatgatcaatatacccacatgattctaatgaagttcctatgtgtttctctatcaaaggtttatcacagatgaatgtccagaatgtttgtgatgtttacaacaataatttctcaattcacacgaaaatctcagctcttttttttaacctcagtcgcaaacattctatttataactgtcaattaactgaaaataatcgattaagtacgctccaataatcgattatttatcatttgtaatcgattaaatcaagatagtaatcgattaaaaagcttgtaaaacgttcagagttccaagaacgagatatttaatcgattaatccgattcgtaattgattaagctagaggcacatgttttttcaatttaaacaatgtaatcgattaattaactaatgtaatcgattaaaatgattgtaagcatttctggatttagacaaagaacaatataatcgattattccatgaagtaatcgattaagacagtcagaatacattatcctaagatgcatgttcaagcatgtaatcgattaaactcttatgtaatcgattaagaccgagaacaccatatttcatgaaaaacctgagtaatcgattaaaaagatatgtaatcgattacaatgttcatactttgttttctaaaggtcacgaagaacaaaataatggatgttccaattcttgtaatcgattatttatttgttacttaatttttccaaaaactttaactttctaagtgcctttctaatcaattgtttttacttaatcaatttattcaatgatcttagatgaatgaatgatgcatgacacacacacacatggattatcagatcatatactttcttttactcatgatcaaattgattcttcaagctttcctttgagcaaatccttttgtgcatgtttgaaagtccaaaaccttgaagcttgatcttcattcttgatacttggcttcacttgaatcaacaatctccccctttttggcttttaaacatgccaaatctttttcttgattaagcacagatacttggagatcaatttgcataagctattgtttgataagtattatgaacctgaaaacttttaagcaatctagccaaaaacaagtgttaaagtacatgctgttcatgaatcattcaattaatcatttttctatcagtgttagattcagttttgtacataaactccccctaaattttagcttccattcaaattgatatctgggcaaaaaaaaacaaaacagggataaacagagtatcaaacagagtatcattttactatccctttgtcctttgttttactagtatcattttactccccctttgtcctttgttttactcccccttaatcaattattctccccctatttggcttgttaaaagtcaaaaataaaatgagcacagcggattaatactgaaattgaatcaattcattgatattatagcatatagggcaagcatatactggaattaaaaatacaggaacactgataaaaacagagcatattttgctcattacaaaataaataacagatcatacttttattaatttcgaatccattgcatatagaaaacagattagacaaaaactaaatctaatctatagtagatcagccaaaatctaatgaaactattcctagggagcatctaattctgttataccctagataactatagaagcctaattcttttatttcttcttcactatcatgattctttagccatgatatccttttgaagcaccagcatggtctcagcttttgaagtcttttgagaacatagttctttaggctttcttatcttcttgaaacagagttgagacatgatgcaaagaccataagcaggagaagaagaaaaaattgcagagatagtttcaggatagaagagagtgtaggggatgactatttcatggaattttagtctctatttataggcataatcagactctataagtctctccaccgtccaaattttcaaaggttataactgttggaacaaattcagatttcatgaattcagtttcatcataaatgggcaattatgaaactcataaaacgcgtcagagtctattcaacagaccgaataatctattattacattgtgtaatcgattatttcagttcacttgattttcttttacaacaaatggtaatcgattctttccctaagtaatcgattaatttatcatgaatcagaggttgaagacaactagtaatcaattcttttcttagtaatcgactattacagagcattgattcatttgaatatgcagcaaagctatatgtaatcgattatcccgtatggtaatcgattattacagagtgaacatcttttcaatagcataggtaatcaattacgattcttaagtaatcgattattcccgagagacatattttgaagaattgaacttttatacttagtaatcgattattccgatgtgtaatcgattattccagagaaaggtgttttcttagatagtgaagaataatcgattaccattggtatgtaatcgattacatgattacagatttccttccagacattaattttaatgattttaatcgattaacccgtggtgtaatcgattacaacagatcattcaacaaaaaaatagagcagtgttgtagctttttgacatttattcaaacacttaaacattttaagaacatattggctttcatatactacacaaaccacaaacagaacaagctagacaagattattctcatcaagtactcctagcatgtttctaagtgtataaaatctatctctagaaagtggtttagtgaaaatatcagctagttgatgattagtatcaatgaagtttacctcaatgttacctttttgaacctgatccctgaggaaatgatgccttatctcaatatgctttgttcttgagtgcatgattgggttctttgatatgttgatggcacttgtattatcacatagcagaggtatagcattcagtttcactccatagtcttgcatttgttgcttaagccataagctctgtgcacagcaacttccagctgatatatattcagcctcagtagtggataatgccacacatgattgctttttgcaatgccacggaattagagagcttcctagcatatgacaagtaccacttgtgcttttcctatctaatttgcaacctgcaaaatcagaatcagaataaccaacaatatttaaagtagcaccttttggataccaaataccaactcttggtgtagccttgagatatttcagaatcctcttgacaatagttagatgtgactccttaggatttgattgatatctagcacatagacaaacactgagcatgatgtcaggtctgcttgctgtcaggtacaggagtgatcctatcattcctctgtattttgactcatcaaccttctttccatgttcatctgaatctagatatgttgatgtagccatgagagttgtagcatctttgctcttttccatctcaaattttttaatgatttccagacagtacttggattgactaataaacgttccattcttcatttgcttcacttgcagtccaaggaagaaggtaagttcacccatcattgacatctcaaattctttctgcatagctgatgaaaattctttgcataacatgtggttagtagaaccaaatataatatcatccacatatatttgaactaataagaaatcattgccaagccttttgataaacaatgttttatcaacacttcccctgttgaatgattgttcaagtaaaaacttgcttaatctttcataccattgcctaggggcttgtttcaaaccataaagtgtctttctcaatttatacacataatctggatgtttaaaatctttaaaaccaggaggttgttcaacatatatttcctcctcaatgtatccatttaaaaaagaacttttaacatccatttgaaaaagtttgaaatccatgagacatgcatatgcaagtaataacctgattgcttccaatcttgcaactggagcaaaagtttcttcatagtcatgccttcctcttggttatagcctttagctaccaatctagctttattccggactatgattccactttcatcaagtttatttctaaaaacccattttgtgccaataggtttgagagatgaaggtctaggaaccagctcctaaacttcatttctcttaaactgctgattaagctcatcatgcattgcatgcatccaatgttcatcattcaaggcttgatcaatattcttaggttcaatttgtgagacagatgccatatcacaacataggtttttttaatgaggatctagttgatactccctttgaaacttcacctattatgttgtcaagtgataagtctcttgttgttctccaatctttgggcatttgttcaggggatgtgagtctttcttctgtttcagcacttggttcttcaatttttgttgaggtattgcttgtatcaattgtttccagctgtcctgcatcatcatttaattctttttcctccttagaggtgttagtctcatcacaaatcacatgtattgattcttcaatgcacattgttcttttattaaacactctatatgccttactatgcaaagaatatccaaggaaaattgcttcatctgccttagcatcaaattttccaagtgactcttttccattgtttagtacaaaacacttgcagccaaaaactctaagatgagaaatgttaggttttcttcctttatatagctcataaggagttttctttaaaataggccttataagtgttctatttaaagtataacacacagtacttactgcatcagcccaaaaatacttaggtaaattagattcattaagaagtgttctagctccttcttcaagagatctatttttcctctccacaacaccattctgttgaggtgttcttggagctgaaaaattgtgattaattccattctcttcacagaacttttcaaaaagctcattttggaattcaccaccaaggtcacttcttattgaaactattttacttcctttctcattttgagtgagtttggccatttttcgaaaagcaaggaaagcttcacttttggattttaaaaacatagtccaggtatatctagagtaatcatccacaatcacaagtccataataatttccacctaaactcatggttctagaaggaccaaataaatcaatgtgaagtagtttaagtggtctagaagtggaaacaatgtttatactttgaaaagtacttttagtttgtttccctttttgacaagcatcacaaagtttgtccttctcaaacttaagtttgggtaaaccaataactagatcttttcttatgagcttgttcatgtgatgcatgttcatgtgacttgctcttctatgccacagccaagtttcattcactttgctgattagacatgaagatttatgaaataatgcatgatcaattgaaagcacataaatgttacctcttcttttacctatgtgcagtacctcaccatttttgtcatctgttataatgcagttgtctctgttgaaattcactttatagcctttatcacaaagctgactaatgctcaacaaattatgcttcagcccatctacatatagcacactcttgatcttggttttgatgttgtctccaatatttccttcaccaatgatcttgcctttgttattatcaccataagtgacatatcctccttcttttaatgtcagatttgagagaagggacatgtctccggtcatgtgtctagagcatccactgtcaagataccaagttgatgttctagctcttagacacacctacaaaagcaaatcagattttattggaaggtacccactcaaggttggatccataagggttagcttttctagttatcttgggaatccaaatgcaatcaccattgggcacatagaatctcctagcatagcatttaaaagatgtgtgcccattcttcatacaatagttgcaagtgacagattttttagttttcccaaaaccagaatatttgttgactcttgagttcttttgtcacttttgattcttctgttttggaggtacaaaaactatttttccaaatgattttgatccatgtttataccccaatccagaagtatcaccagcatatttttgcacacttaacatttcagccaagttgcatgtacctttataaaactttctcaagagatcgatcaaataactgttgttggataagagcaacatatactcttcaccttgactttgtttataatcatcaaagtctttttgaagcatcttatacttgtcaacattgctaaaagaagaagcacacacacagccattcaatttgtaacttgaaacaagtttttcattttcttctttcaagctgcaaatttcattttccaaatcagttattttctcaatatgccatctaagatttcctttaagcttattattggcttttgcaagtttttgggcttcctcatacatttcttgaaaagcatgaatagcttggtcaagttcagaatttacctcgcttccttcactaagcaaatcatcatcatcttcattgatggttgaggtgagacacatgttagcttcttcattttctgtggaggaatctgaagttgttgactcattgtcctcccaagctatgtaagctcttttcccttttccttccttcttgactttgctctcagcttgttgcttcctcaagtagattgcacagtcggatttgatgtgacctggtttgccacattcaaagcatgtaaagttgttgtcaatcttcttgttgaagttgttgttattgctgctgtttttgcttcctttgctgaaccttttgttcttgtttctcctcagaaatttgctgaactttttcaccactaagttcacattctcttcatcatcctcttcactagtttcctcttccttttcagccttagtagttgcagctttcaaggcaatgcttctcgttttcttctctgcatcttcacaagatgttagttgagacatttctaattcatattcaagaagcttaccaaataatgcagccattgacatttttgataggtctttggactccttgattgctgtaacttttggttgccaaggtctggtcaagcatttcaatattttgatgttaagctcctcggtatcaaatacttttccaagacccaaaagatgatttactatatgagtaaatctggtctgtagctgtgaaatgctctcattggagttcatcttgaacatctcgtactcatgaatcaaggcatgcttccttgaccttcgaacctcttctattccttcatgagtgatttcaagcatctcccacatctctttagcgcttgtgcatctcacagtcctgaaaaattcatcagaggaaagtgcagaggtgatcatatttttagctgtaaaatcatactgtacatttctttgttcaacttcagtcatttcatcccattctttgggaatcaactcatttgccacagttttctttggaataaaaggtcctttcataattgcattccatgctccagggtcatttgattgaataaagattttcattctatttttccaaaaactgaaatgttccccttcaaacattggagatctgtttaaagaggcaccctccttaaaggttacttgtgaagtattcatggttccttttgaaaagaaaaagtgatcttgagaaactttcaagaaccagctttgataccaattgaaaaacaaaggaacacttcaaacaaccaagagggggggtgaattggttgaaaacttacccaattaaaatttatatcagagttatataccacaggatctttatcacaattaaaccaattttcagaaacagaacaaatttcaatatcaaaatcagttttcaatcaacttccccttttatgagcaacagaaaatagagtattacaaatctgagcaatgatattgattcacaaacaaagtaatacgaaaatgatctgaaagaatagagagaacacacagatttttatactggttcaccttaaacactatgaggctacatccagttctccaactcaacactagagaggagttccactattgcaataatatctttacaagcaatattacaagtctctttccttcaacctagaagaaattcagaaatctaaaaccctattagattcttagagacaaacccttcaccctgagaaccctactcaggtgaatcctagagaaaccctatctctatgcttgaaagtaacaaattacaacagaaatacttttaccaaattacaaagaaattgatttacacaatcaaaagccaagaaaagatatcacctgataatccataattgaatggatatgaatgattaacagatgaatacgcagattatcaccatagatatgcagcttttcttgtgacttgattgcaagaagaaacttcagctcatgatcaatatacccacatgattctaatgaagttcctatgtgtttctctatcaaaggtttatcacagatgaatgtccagaatgtttgtgaatgtttacaacaataatttctcaattcacacgaaaatctcagctcttttttttaacctcagtcgcaaacattctatttataactgtcaattaactgaaaataatcgattaagtacgctccaataatcgattatttatcatttgtaatcgattaaatcaagatagtaatcgattaaaaagcttgtaaaacgttcagagttccaagaacgagatatttaatcgattaatccgattcgtaatcaattaagctagaggcacatgttttttcaatttaaacaatgtaatcgattaattaactaatgtaatcgattaaaatgattgtaagcatttctggatttagacaaagaacaatataatcgattattccgtgaagtaatcgattaagacagtcagaatacattatcctaagatgcatgttcaagcatgtaattgattaaactcttatgtaatcgattaagaccgagaacaccatatttcatgaaaaacctgagtaatcgattaaaaagatatgtaatcgattacaatgttcatactttgttttctaaaggtcacgaagaacaaaataatcgatgttccaattcttgtaatcgattatttatttgttacttaatttttccaaaaactttaactttctaagtgcctttctaatcaattgtttttacttaatcaatttattcaatgatcttagatgaatgaatgatgcatgacacacacacacacatggattatcagatcatatactttcttttactcatgatcaaattgattcttcaagctttcctttgagcaaatccttttgtgcatgtttgaaagtccaaaaccttgaagcttgatcttcattcttgatacttggcttcacttgaatcaacacattggatgcatgctatgcatgatgaactaaatcaattcaagagaaatgaagtttgggaacttgttcctagaccatcatctttcaagcctattggtactaaatgggtttttagaaacaaggttgatgaaagtggaatcatagtaagaaacaaggctagattggttgctaaaggttacaaccaagaggaaggcattgcctatgaggaaacttatgctccagttgcaagattggaagctataaggctattgcttgcatttgcatgtttaatgggttttaaactttatcaaatggatgttaaaagtgcatttttaaatggttacattgaggaggacatctatgttgaacaacctcctggatttactaattttaaacatccaaatcatgttttcaaacttaaaaaggccctctatggtctaaaacaagcccctagatcatggtatgaaaggttaagtaaatttcttcttaaacaatctttcataagaggcaatgttgataaaaccttgttcatcaagaggcataaggatgatattctattggttcaagtatatgttgatgatattatttttggttcaactaatcaattgctttgtaaagaattttctgcagctatgcaaaatgaatttgagatgtctatgatgggaaagttgacattctttcttggacttcaagtgaaacaaatgaagaatggcactttccttaataaatcaaaatattgccttgaagtcatcaaaaagtttgaaatggagaaaaccaaagatgctgcaactccaatggcaacatcaacctacctttattcagatgaaaagggaaagaaagttgatgaatccaaatttagagggatgattggttctttattgtatttgacagctagtagacttgatattatgcttagtgtttgcttgtgtgcaagatatcaagcaaatccaaaagagtctcaccttacagcagtcaaaagaatcctcaagtacctcaaggtagccccaaaagttaggctatggtatcctaagggtgcacaaatcaatattattggatattctgactctaattttgcaggatgtaaattggataggaaaagcacaagtggcacttgtcatcttcttggaagttctctcatatcttggcattgtaagaaacaatctggtgtggctttgtcaactgctgaagctgaatatatctcaactaggagttgttgtgcacaaagcttatggctgaaacaacaattgcaagattttggagttgaactaaaagagatacccttgctatgtgacaacacaagtgtcataaacatctcaaagaatcctgttatgcactcaaggaccaaacacattgaaattagacatcattttctaagagaccatgtgcagaaaggtaatatcaagatttattttgttgatacaaacaatcaattggctgatatattcacaaaacttttggctacagataggttttatgcacttagaaacatgctaggtattcttgatgaatctaatatatgctagcttgtatatttcatgtgtctccatgctaaattgaaatccattgatatctccatcactaaaagctgttgaaaattcgaattggtctacataatgccctgcaatctgataaattctctgtaataattgattacactacagattaatcgattaaaatcattaaaatccacccttggtaagctttttgagctatgataatcgattacaacataaaaatcatcgattattctgttatttttgaaaatgggtttctcctggagtaatcgattacacgtcgggataatcgattacattgactaaatgtgtttttcagtttcaaagtttcactggagtaatcgattacagtgaaattgtaatcgattacactacaatcttttatgtttcaaaattgcaaaacttcctggagtaatcgattacgagtctaattaatttattacataagctctattacctgcctgaattcctaaaaattctgatataatcgattacaagtcatcttcaacctctggatgcttgtaagataatcgattaccttacaggataatcgattaccatgtgttattttttgtgttctaaatgtgtaaaataatcgattacgatgagcatttaatcgattatttaggcagttgctgcgtatctgacagttttctctggaaatgtaactgcccaaccaaatcaaattggaatctaacatcactgcagtgccttaactccctctaacagctatatttttgaaaattagaatgttagaagcctcaatttggtctatatatagaaccttgcatccatagaagatcttgcaccattatctcttctctctcttgctatatttctgtgttttccttgtgtctgagtgtgtagaatccctcctaaaatgtctacacctaagagagttagaactggcaaaaggaaggtaggagaatcctcttccaatcgtcctcctcctcctcctccacctaatagaattgacctttagttctcaaatgagtttgataaaatgaactatcttcagttcaatgccacaaaaccagtgtgttcacctaaataccttgacctaaactggttcataagggaaggattttaattccctgcttatctagagacccaaggtcttaggagattcttagagatgaaaggtacatactaccctaaactggtaaaggtattctatacctatgccaagggttccatgaatgggaccatgaaatctaaagttaagggtgtcactgtggagattacccatgaagtctgggaaatagtagttggggttttatgtgagggtgagagaaaatttgatgaggatcctgagggttacaacaaacttgatacctacagggacatgctcaatgatccccatatgcaaattaggaataagttgggtactggctcaatgacaccagaggataggttactacattacattataacctatgtcttaacccctagggcaaccaatcatccccaagccactgatgaagacctacaactagtgtatggtctaaagaactccattcccatgaattgggttctaatatttaaagaaattatgttaaaatctaataggctagtcaactatccctttccctatcctgttctggtttctaagttcatagatcacttcaatattgatgtttctaatgaagttatggaccacacaaactctagtaacagcctcatccaaaataaacatcttacaaagcttggaatgatgaagacaccacaaggatgggtgatggcaagccaaccaccaatgtcacgaccgcttctattacgtatttatttgatttgaaattgaaatgaccgcttttatttcgcttttatttttcattggtgactaaaatttttcgaaaataataataataaaggctcaaattaaattggttaagttttaaaaaaatgctttttaagaaatataaaattttacgcgtaattcttaacgtaatccatgacgttcactcctacagtccattatcacaaatccatagtccaatacataaacagtccatggtacagatcaaagtatagatcatcaaaaacagagaatcatcacaacagcttcatcacatcttctagtacaacatccatatcactgttcctctgctcgcccaaatcatttggggtcatcacaggtgtcaaccacaagacacaaaaaagggtaagtcatgataaacaaaatttaaatatatacagaaatattaaatatacgtaactagttagataaaacacagagaatatattatagcagttattaatcatattttactccacacatgaattaaatcatctattttccacacacaacacgtaaggaaatgcatgctcatcttattatatgatgcatgactgagttctcagcaacatctcaaaattgtggccactgtcagatagcttaacacctcgcgagttggattgatcagtcaggataggtccgtgttgcaataggactcacacctactagacatgtgatcatcatgggtaggtgatctccccacggccacttcccccagttcaacaccatagaacactctttctcaactctagctatctgacacacctcttcacgaggtttatcgtctcatcatctcaaattttaccccaccgggtagatgcatatgaaaatgcatacatgattcattttacatcgtttagttattcttttattttcatcacaactccatatcatagagtcacaatattatcacagaatcaccatcacagggtcatcatctcatcacaacatcacaaggtcatcatcacagtctcatcacaacatcacagggtcatcgtcacagtcttatcataacatcacaaggtcatcatcacatcttcacagtcttaagtccaaatgattccacacagtccatattactcaattttattagaaatcttttattcaatttcattaaaatcttttactggtaacagaaataaaattatatgatccacatttaacaacaatataaatacataaatcaaagctaaagaaatctctcaaaataagcttgtttaaggactaattcatggaatatacacaacatatagtaatttatggaatataacaaaatatatatttgtccataatcaaaataattcatgaaatataaactaaatcctttagaaccttgtaactggttttaggttgatttaattatttcctactaagattactgtcataatccttttgttaattatttttccaaggcctcttaattccttaacttcctttaaaccatcttaaaccatcctaataatagcttttgcatatacttaaatttaatctatcaaaacttccctcaccttggctttagatattaatctaccttggctttaaaattcccttgctcctcccacgtgaatcttcccaaagatgggctgttgtggctttgattttgatggagcttgaaaaggatatagaaagttggtttttagaaaacaagagggccttggaatggcacggctatctttgttttagtttttgaaaaggtttggaaaaacaacaaagctttgatcatttaattcttggatttgtgaggcatatcatccgtagccttctttccttgtgcccaccggtccctcctcttttataatcctaagcttatgtcatcctttactaataatacatgcttatctacatatggccctctttaattggctagccaatagcttgcttccaaataacctccaagtacatgaattattaattcctctaagctttcaatttccacggctctcccccttgaagtgtaatccatccgtagcttttcctctccttggcatcttttgattaattcaaagtcttgtgaagagccaatgggaattaagggaaacttttctaccattttcaccaaccaatcataagcaatttgacttttctacatttctagctttcttttcctattggtccctatctcctccacggttttgcttcaatttgtgacaccaataccttcaattttttacttccaccgtggattgcctttccttggatgagtttcatttagattccctcctatttattgcttattccccttgtcccaccattattgacctatctttccttaagtggtttcttattggttgcctacttgaccaagtatacttcttgcttccttatccttcacgtggtcccccccttcaaaggctgtccttgcttgtttatttttccacctatccgtagcttgcttagtttattccaattaatttttatttttttttgctttttgcccaaaaacccgtattactaaaatactcactctgaattggttcaccgttggatcttcctagaattttaaaggcatactcctatcccatatatctaacttttgaccgttgcgatcgtgaaaataatgcttagaatttcctccgtatccaaaagagtcaagaagaagtttttcttttaatgcatgtaatggcaaactcctattttttattgattcgcttcacttttaattattaaaattactcatccaacttattaaattagtctatttatcccataattaggagaaaactccaaagattatgactatcctctccatacaattttctgatacctgaagtagtctagattagactcttttcaaattatcttccaaaattcctaaaaattactgtttaggattttctgcccctaatcatgttaataatatgttgtctaaaagtattctatcccatacttaggttcccacaattttctaaagtcatcttggtcagttttgatccaggggcattttggtaattttgtccctcactctaggggtaaaatcgtcatttccaaaaaaaatgttaagggaaactctgtaattgtcaccctaagggtattttgatcattttttaaacatcccagagtatttataaaattttctccttcatatatcttactaaaatgcctagggacaattttgtcattttcaaaatgtccaagggtattttcgtcatttcccttaaatccttctgtactgtttctagttaacattttaccccaatatttgactgtgattccaaaaatttggggtgttacaaccaatgcctcaacctcctcctactgctgttgatgaagaagaagaagctgttgaggatgaaggaagggatccaaatcaacccatgtatactcagtttgaatcccttatgttgcagaagatggataacttactccaaatgcaacaagaatttaaggtcgaaactagtgtagccttaaatgaaataaaagataggctagatatcatagaggacactataaaatgtgatgaatatgaaaccttctaggcctatgaattttctttttatgctctagttttttttttactgtcatgtttaaatttcattagttgtaatggttcctccaaaaatatataaacttccattgtgtttctcctttaattatttgttgtgcactttacatttttgtctttcacaagccaaatagggggagaaataattgattttaattgattttggacatgctctgcctcatactctgttcatccttgtttttcgttgaaaattatgcccaaaatttgacttgaatggattgtgaaatttagggggagctaagtgcttaaaatgaatctattaaatctataatacttgtaaatgaatgctaaatgaatcacagatgcttttaacacttgttcttggcaaaggaattggaaaatttttaggtttccaaagctcaagcttttcccaatttggttcatcaattaacttcaagtccaactgttaatcaattaaagatttcccatgtttaaagccaaaaaggggaagattgttggattcaggggaagctacttaaagaatgcaaaagaattgtgatttaagcatgagttttgagctttcaacatgcaatggatgccttgaagtttaattggtgtaaaatgtgtaagagaaaagcaattctggtgatccaagtgcattgcattcatattaatctataattaaattaattgggttcatgaaaatcacaaggctttagttatttgactaagcttttaatttgattcaaagtgtttttggaaaaatgcattttatactgttgtgatcgattaccttaaagacttaatcgattattttgttcttaatctattttggaaaagctttcaagaacaatgtaatcgattacctatcgggataatcgattatttgacctttgttttcatataaattgccttgttgaatactttaatcgattattaataggtagtaatcgattacttagctatatatgatttcaagttgtgctgggataatcgattaccaatgtatcgtaatcgattacactacatgttaatgcttacaagtcttcctggtttaatcgattaccacacatcgtaatcgattacatagttcattcagtttttgaagactcctgctttaatcgattaccacattcttgcaatcgattacagtgtattttgtcattctgatgagttttctgtcttaatcgattacaggacggaataatcgattattttgctcgttgcccatgcccagaaactatgttgaacactttaatcgattacaaggtttatttaatcgattacatgagtgttttaatcgattattaggcgcgttaaatcgattacaggcagttacaaaaagctgttataaataggactgatgctcagctgcttttctaacttggtggaacattacccatatgtattttctgagcttaaacaatcttgtgagcattctaaagtgttttctaagggtttaatcatttcttgctccattgtgctttgatcatgggtgtttgactcattcttagagtttgaaaaccatttcaagattaagaaaagttgtgctaattgatttgtaatcattcaatctgatctggtaacttcatcttgcattgcatacattggatcatcaggttgtttctctccttaatctgattgtaattttcgttttggattttctttgtaatttggctattgtaattgggttcttgcttgaaactagagaaaggggttctctaggttaaagaactgagtagtgttctcagattcttgtctcttagaatctgatagggttttagatttctgttctttatctagggttgataaagggagacaatgcaattgattgtaagaactgaaaattataataatggaactctaacctagtgttggttggaagaaaaattggatgtaagtgaactagtataaatctgattgtgttttgcttctctattctttaactcttatattcattgtgttattgattaaatttcttgaccaacaaagttagttttgatccattgaattccttggggctgagatacttgattgaataaggtttcttggttttgaaaagtgataaagatcttaggaactctgattttgattaaagaaatttttaatttaccaaggtttaatcaattcacccccccccctcttggttaagtgtgagatattcatattctttacaacaacaaatagaggccttgaccaaacagataggccaacttcctctaatatttcagcaagcacctcatgattatcaacaagaagaggaggcttattatatgcaaaatcagaccagacctcaacagaacttccaaggacattaccaaggctacaaagatggtccaagttcttatggctggaagcagaaatatgaaaatgcatattatgatccaactaactcttcttttgcaggtccctctaacaactcttatgtaggtttttccaataaggttccactacaacaacaacaagaagaagcttagcctgattgaatataaaaaatggaagatactctaactcagtttatgcagatgtccatttcaaatcaaaagaacactgaggcttccatcaaaaatcttgaagttcaggttggacaacttacaaaacaagtgtctgaaaacagaagtggacccttactgtaaggaccctcattcatggtaccaggattctttaacaagaaaacctagttttagacgcggcgtgggtcgcgtcagggttgccgctgatagcgccagacccactggccgtggcgccaggatggcgcgggtagcgccacacatccggcaagtccacgctaatggcgtggttacggcgcgagtagcgtcattgggccgagaggttggtgcttgtagcgccaagggccgcgcgggtcgcgctagaagtgccttggaaacacaatttcctagagtttttcacgcagatggcgctagtgtggcgcggatggtgccacaggttcgagaagttcacgctgatggcgtgggggatggtgctgttggcgccggagcaccgacattgtggcgcggatagcgcgggaggtggtgcggatcacgccagacctcgggcaggcagagtatttaagggcagatcgcatttttgggaaggagaaactgcttcttcttcctcctaacgccctggacctccattagagcagttccaagcttccttagcccttatatactagcctaaacacttccctttggccttggaacttgagagaaccgattagaaagcttgaatccttcatcctttttcttagaaaccccttggtgagggagagtctttttctccagagaaaacctcagaagttgttgtttggcgaggaatcaaggcacagcagggacaacagagcttgtggaagctgtcctgcagcctttctggtcgccactgaggtaagaaactcaagtttctccggttgtctgtgaatttggggttttctggatattgtgacccacaatgagttggggctagaattagcccagggtcctgtagagaaacttgctcagggtattgtagtgatgaaggattagctttcagtttttaatttgaataactttgaatcttggctctgtggcttgtatgggtggcttgtgtgataagtcacttgtggttttggagccatgccagagccttgattatgcttgtgttgagcctgagaggctagtggaatggtgtcttggttaagatttaagccattccagtgattttgaaccttgaggctactgtgagactatgctctggtagatgttttgcattgagtctgtgatgactcagatgctttgtatgtaaccatgatggaccttgaaaggtctgagagaagcctagtgatggcttaagttgattgaaccctaggatagggaaattttgatatgatatgttctgattgaatgtctattggattgattttgatatgagactgcatatgccttgattagggcttgattttgagactgttggtggcgggagccacagaccagggaaagaactgcagagtgataccttgccaggtaagttcagtgttcctggggatgaattcccatcttgtgtgccacaccacacttcgggggagtggtggtcatttcatgatgcatgcattggtagttgcatcctcataatgatatatgtgtgcatctgtgcttgatttgtgatgtgatatgactgtgatagatctattggccaatagatagatatggacctccctaggagatggtggtttcctcctagtatggttggctcatggttgaggtagctcctagggaattgattcccatagaccatggggatagaagttgaggtagttccttctattctcggaggtaccatatatgtgcatccatgcaaagcggtagcacccaatgggatggcacaggtgtgagttctggtctcacactgatataggcgtcgaggtagctccgccaggcgttgaggcagctccgccatgtttgtatgatatgcttatattgttatgagggcccgagggccaggccagtgggccaattgcttgtgataactgatgtatgtgttatggaagtgggccagggtggaggagatgcctccatggaccctaagcttactgagatgtgttatctcaccccgtgtggggaattatgatttcaggtgacttttctggaggaagagagcagtctcagggcaggaggccccagcagagacatgggctgcttgactgagaagcagcagatagagcttgaaggctcagatttgttttgattatattttgtacccttgataagggatggtgtgtgtgtacacctgatacatgtatagttctgtataccctcggtgagggcagatattcttttgtatcaccatgatttggtgtgaactgtgatgtatatgtttgtacagaactatttatgatatgtatatgagactttcctcctgagtataaatgttgtatatttgataatctgcctaagtcttttagttatctgtctttatggtatatgttatgagaaactggatcagcgggggtgtgaaaaaatgtgtcttgtatgtatgttgtttgttatatgttttattccatacataatgaatcaagaaaagcgattatgtgcttccgctgaggtttttaatcatgatttaagcgcttatctgatattattaatgataacacttcggaggcctacagggtgttacacttaccctcttcagcaaaaacacatgataatccaaaagaaccaagaggatgttttagagtggatgtcttgaatggagaaatttctgactccaagaagttggttcaaggaaaagattattcagagaaaacaataactgaagcattagaggaaatgagtgaatctgaagaagatgatagtttagattatctccaataaccagatgctttcaaggaaattccttaccaacagtctctatctttgaggaattgttagaggaagagaaagatcaagaatcacaaaaaaaggtaaacgcagtacctccacatgctaataatgttttccttgcaggaaattcaaaaaaaccagttaccaaccattcaagtatctctgaaaaagaaaagaaactggtgaaaatattaaaggaaaacaaagcagccaatggctcatccatattgtccaattgctgggagccaaagccataacaaatgtgtctagctaaaacgacgttaaagaagcgctcctgggaggcaatccaatgtttttaaattttatctttatattttatatatattatgttttatgtctgtttaaattttatgtcttatctttttgaatgtattatctactttgttagaacttggatacaggtccatttgtcaggaggatacaaagcaggaagaacgtggcagatctgttgattcaagagaagctatgcataaatgaacaaggaacaagctttggtgttttgtgctttcaacatgccttataggaaaaatgccaaagaagctatgaagatcaatttgattcatgtaaaaagggaagttgtgtaatctgataatccaagagcatatcatgcataatcattcatctaggattgttagattgaaggtctaaataaaagcaattaacaagtaaggcatttaaaaagcaaagtttttggaaaaatgatgttttcctacattaatcgattacagcattgatggcatcgattattttgttcttcgtgccttctggaaaacaaatcaagaacattgtaatcgattacataggctaaaatggaaaaatcttactgattgtcttaatcgattacataagttcgtaatcgattacatctatgcatatggattacatgttctgctgatttaatcgattacatatcattttaatcgattacatagtacatatgagaatataggattgtctgcttaatcgattaccaaattttgtaatcgattactcagtgcatttggaaaaacatgactgtctgtcttagggcctgtttggatgtaaacttctctagaagcacttctagagaaagaaaataagaagaaaaaaaaggaaatgagcttctccataagctaaaatgagctttccattagctcatttgtagatgttatctcatcgtttagagaagctatattggtgagcttttaaaaattagctaatggacaacttatttttacttttggagaagttcatttcattttttccttttggaaactctgatttgaaaattttaatttactaaggttcaaccaattcacccctcccctcttggttgttttgaagtgttcgtataattttcaattggcatcaagagctggttcttgaaagttgctcaagatcactttttcttttcaaaatgaaatatgaatacttcacaaataacctttaaggagggtgcctctttaaacagacctcctatgtttgaaggggaacatttcagtttttggataaaatagaatgaagatctttattcaatcaaatgacccaggagcatggaatgcaatagtgaaaggtccttttattccaaagaaaacggtggcaaatgaattgattcccaaagaatgagatgagatgactgaggttgaacacaaggctgcacaatatgattttaaagctaaaaatatgatcacctctgcactttcctctgatgaatttttcaggactgtgagatgtaacagtacaaaagaaatgtgggagatgctggaaattactcatgaaggaactgaggaagttagaagatcaaggaagcatgttttgatccatgagtatgaaatgttcaagatgaacaccaatgaaagcatttctcagctgcagaccagatttactcatattgtaaatcatctattgggtcttggaaaggtctttgacactgaagaattaaacatcaagatattgaagtgtttgacaagaccttggcaaccaaaagttacagcaatcaaggagtccaaggatctatcaaagatgtctatggctgcactatttggtaagcttcttgaatatgaactagaaatgtctcaattaacatcttgtgaagatacagaaaagaaaacaagaagcatagccttgaaagctacaactttgaaagctgaaaaggaagaggaaacaagtgaagaggatgaagaagataatgtgaacttggtggtcaaaaagttcagcaaatttctgaagaaaaacaagaataaaaagttcaacaaaggcagcaaaaacaacaacatcaacaacaacctcaacaagaagattgacaacaatttcacatgctttgagtgtggcaagccaggcaatatcaaatctgagtgctcaatctacttgaggaagcaacaaggagaaagcaagatgaaaagggaaggaaaagcaaaaagagcatacgtagcttgggaagataatgagtcaacaacttcagattcttctacagaaaatgaagaagctaacatgtgtctcacctccaccatcaatgaagatgatgatgacttgctaagtgatggagatgaggtaaattctgaacttgatcaagctattcatgcctttcaagaaatgcatgaggaagcccaaaaacttgcaaaatccaataataagctcagagggcatattgaaaaaattactgaattgcaaaatgagatttgcaacttgaaagaggaaaatgaaaaacttgcttcaagttacaaattgaatggatatgtgtgtgcttcttcctctagcaatgttgacaagtataaattgcttcaaaaggattttgatgagtgtaaacaaaatcaaggagaaaaatatatgttgcttttagccaaaaacagtgatttaattgatctcttgagaaagttttacaagggaaaatgcaacttggctgaaatgttaagtgtgcaaaagtatgctggagattcttctggtttagggtataaacatggctcaaaatcatttgataaaacagtttttgtacctccaaaacagaagaatcaaaagtggcaaaagaactgaagggtcaatcaaaattctgtttttgggaaaacttcaacatctgtcacttgcaactattgtatgaaaaagggacacacatcatttaaatgctatgctaggagattctatgtgcctaatggtgattgcattaggattcctaaaagaaagaaaaatgttaacccctatggacccaacttcaattaggtaccttcccttgaaatctgatttgaattttgtaggtgtgtctaagagctagaacatcaacttggtatcttgatagtggatgctctagacacatgactggagacatgtccctactctcaaatttgactctcaaagaaggaggatatgtcacctatggagataataacaaagggaagataattggagaaggtaatattggagacaacttcaaagctaagataaaaaatgtgctgtatgtagatggattgaagcacaatttgttgagcataagtcagttgtgtgacaaaggctttaaagtgaatttcaacaaagaatgatgcataatttctgatgataaaaatggtgaggtactgcacataggtaaaaggaaaggtaatatatatgtgctttcaattgatcatgcattattccataaatcttcttgcctaataagcaaagttgatgaaacttggctgtggcatagaagagcaagtcacagaaatatgcatcacatgaacaagctcattagaaaagatttagtaattggattacccaaactcaagtttgagaaggacaaactttgtgatgcttgtcaaaaagggaaacaaacaaagaactcttttcaaattaaaaacattgtttccacctctagaccacttgaacttcttcacattgatttgtttggtccttctagaacaatgagtttaggtgggaattattatggacttgtgattgtggatgactactctagatacacttggactctgtttttgaaatccaagagtgatgctttccttgcttttagaaaaatggccaagcttaatcaaaatgaaaaaggttgtaaaattgtctcaataagaagtgatcatggtggtgaattccaaaatgaatattttgaaaaattttgtgaggaaaatggaattaaccataatttttctgctccaagaacaccccaacaaaatggtgttatggagaggaaaaatagatctcttgaggaaggagctagaacacttcttaatgagtctaatttgcctaaatacttttgggctgatgctgtaagcactgtgtgttatactttgaatagattacttataaggcctattttaaagaaaaccccttatgagctatacaaagggagaaagcccaacatttctcatttaagagtatttggcagaaagtgttttgtattgaccaatgggaaagaatcacttggaaaatttgatgctaaggcagatgaagcaattttccttggatattcattgcatagcaaggcttatagagtattcaataaaagaacaatgtgcattgaagaatctatacatgtgatttgtgatgaaactaatccctctaaggaggaaaaagaaattgatagtgatgcaggtcagctggaagaattaattgaaatagacaaatcctcaaccaaaattgaagaaccaagtgctgaagcaaaatccacaacccctgttcaagtgcctaaagattggagaacaacaagagatttatcacttgacaacatcataggtgaagtttcaaagggagtatttactagatcttcactaaagaccctatgctatgacatggcttttgtttctcaaattgaacctaagaacattgatcaagccttgaatgatgaacattggatgcattccatgcatgatgagctcaatcagtttaagaggaatgaagtttgggaacttgttcctagaccttcatctcttaaacccattggcactaaatgggtttttagaaataaacttgatgagagtggaatcatagtcagaaataaagctaggttggtggctaaaggctataaccaagaagaaggcatagactatgaagaaacatttgctccagttgctagattggaagcaatcaggttattactcgcatatgcatgtctcatgaatttcaaactttttcaaatggatgtaaaaagtgcctttttgaatggatatattgaggaggacatatatgttgaacaacctcttggttttgctgatttctaacatccaaactatgtttttaaactgaaaaaggcactttatggtttgaaacaagctcctagtcaatggtatgaaaggttaagtaaatttctgcttgatcaatcttttacaagaggcattgttgataaaactctgtttatcaaaaggcatggcaatgatttcttattagttcaagtgtatgtggatgatataattttttgttctactaatcacttgttgtgcaaggatttttcatcagctatgcagaaagaatttgagatgtcaatgatgggtgaactaatattcttcctaggacttcaaataaagcaaatgaagaatggaacctttctcaaccaatccaagtattgtcttgaaatcatcaagaaattgagatggagagaagcaaggatgggtgaacaaacattctatcaatattgttggatattatgattctgattttgcaggttgcaaactagataaaaaaaagcacaagtggcatgtgtcatctactaggaagttcattaatctcatggcattgcaagaaataatcatgtgttgcattatctactgctaaagcagaatacatctcagctggaagttattgtgcacaaagcttgtggcttaaacaacaaatgcaagactatggagtagaactgaatgagattccactgctatgtgataatacaagtgccataaacatatcaaagaatccaattatgcattcaaggacaaagcatattgagattagacatcatttcctcagggatcaggttcaaaaaggtaacataaaggtagaattcattgacaccaataaccaacttgctgatattttcacaaaaccattatcaagggatagattttatacacttaggaacatgctagggattctagatgaaagtaacattatctagcttgttctatatgtgttttgtgtgatgacttaaagccatatgtgtcacaaaacaaatgattgcttagaactttgatcaaaagctgctaaattctctgcatctgttgaattgactgtaataatcgattaaagcacgaattaatcgattaatttcattaaaaatcacatcctgtatgaaatttgtgctcatgtaatcgattacacacagatggtaatcgattattcttcgtataacaagaattaacctatctctggaataatcgattacacattgggataatcgattacacattgggataatcgattacattgattaaaattctgtgaatgaatgcatgtctcactatgataatcgattacttaagccttgtaatcgattaccttcaccattagaagaaataaggctcactggaataatcgattaccactcgggataatcgattacttatgccctgttacctatataattcataaaatgaatcatataatcgattactgcaagcaataatcgattactagtcgtcttcaacctctgattaaggatcaaataatcgattacttaataaaataatcgattaccacgtgtttttcagaagcctaattgctctggaataatcgattacttaacgaaataatcgattattcatgttgttgaacgttacctgacaggtttttatgggttatttaactgcccaatcagttttaaaaagcacccaatgtcattaaactgtcaccaacaaatatatttttgaaattatggacgtttagggtctgatttgtgcctataaatagtagattacaagccttgattccctacacctatcctcttctatctttctgcactttctgcaattttctatgtctaaacagtgtccaaaccttccattctaatcatgactgaaccaacctataagagaattaggaaacccaaaagaaaagctggggaatcttcttcaaatccccctcctcctcaacctgcaaataggttagatttatggttttcctcagaatctaataaaatcaattacctgcaattcaatgccaccaagccagtggcctctcccaaatatcttgaacttgattggttcataagggagggttttcagtttccagcctaccttgaagcctaagggctgagaaggtttttagaaatgaagggtaccttctaccctgatttagtgaaagttttctatacttgcttgaagggttcaatgcaaggggctatcaaatcgaaagttaagggtgtagagatgattgtaacccctaagatttgggaaacagtggttggggtaatgtgtgagggtgttaggaggtttgatgaagatcctaagggctatagcaaaatggatacctacagtgaaatgcttcatgatcctcacatgaggcttaggactaggctgggtacaggtcctatgactgctgaggataggctcctacattacataatcacatatgtaataacccttagagcaaccaaccatgcccaagcaactgatgaggatctttagttggtatatgggctgaagaatcatattcccatgaactgggtgctcataattgaagaaatcatgcttaagtccaagacttgtgaactaccctctcccatatcctatatttgtctctaggttgattgatcatttcaacattgatgttgagaatgaggtggtcgacaacacaaactcatccaacagtcaaatgaaagagaaacatttgaccaagatgggtatgaggaagacacccaatggctgggtgatggccaatcaaattggagctgctgcacaaggagaagagatggctgctgattcagaagatgaggaacaacaacagcctgcacaaccagccttcactgattttgaatcattgatgtttcaaaagatggatagcatgctcaagctccaagaagacttcaaggttgaaacccatgaagcctttgaagaaattagagaaagattagattcaattgaggccaacatgaatgacaatgcctctgttgaattctaggattgcttagattgcttttagttttgttattttagtttctatgtttgttatgtttcagtttttctttatatgtttctttctcactatgtactgccctatatgacacttattctaatgaaatatgcatttccagttatatatccgttgtgcttatattgtttttgacttttaacaagccaaatagggggagaattgactaagggggagtaaattcgaatatactttgtttgcccctatttttttgtttaattttttgcccaaaatttgatttgaatgtgtgctggaatttagggggagtaaaggtttaaaaaggaactcaatagaatggtataaagcttaattgaagttccatgaatcacatatgctttaacaactgtttcttggcaaaaggaatttgaaatttttacaggttataaagcttgaagttcatcaatgaaagcctcaattaatctccaagtatctgagcttaatcaaattgtagatttggcatgtttaaagccaaaagggggagattgttgattcaagaggagctatgcataaatgaacaaggaacaagctttagtgttttgtgctttcaacatgcctcataggaaaaatgccaaagaagctatgaagatcaatttgattcatgtaaaaagggaagttgtgtaatctgataatccaagagcatatcatgcataatcattcatctaggattgttagattgaaggtctaaataaaagcaattaacaagtaaggcatttaaaaagcaaagtttttggaaaaatgatgttttcctgcattaatcgattacagcattgatggcattgattattttgttcttcgtgccttctggaaaacaaatcaagaatattgtaatcgattacatatcgaattaatcgatcacataggctaaaatggaaaaatcttactaactgtcttaatcaattacataagttcgtaatcgattacatctatgcctatggattaattgttctgctgatttaatcgattacatatcgttttaatcgattacatagtacatatgagaatataggattgtctgtcttaatcgattacaaaattttgtaatcgattactcactgcatttggaaaaacatgactgtctgtcttaatcgattacttcacggaataatcgattaattgttcatagctcaaacccagaacatatcaggagcactttaatcgattacattcttgatttaattgattacaaatgcgaaataatcgattacaggagcgtgtttaatcgattattttcaattagaaagttgttataaatagaacttcttgctctatgttttataaacttgagaattttgaaatctgagcaatcacaaacactcctaagctttcttctgggtttctaaaagcattttagcttcacaaattcgtatgggtattttggtcttaaagaagtgaagcatcattaaggttcaaagcataaggaagggatgcattgagtctgtaatctttctttcaacctgttgaatcattcacatgcatatgttttctggattatcaggtgaaatctttccttattctttgaaggtgtaaatcttttaattgatttctgtaaagattagcttattgtaaattgggttcttacatgaagattagagatagtgtttctctaagggttgctgagtagtattctcagttttgggtttggtctctaagggtctaatagtgttttagacttctgaactttatctagggttgataaagagaggcttgtaacatcttgtaagaatattatttgcaatagtggaactctactctagtgttgagtggaagaactggatgtagcttcatagtgtttgaagtgaaccagtataaaatttgtggctgatctttattcctttctcttcatctctaaattgctttggttgtgaatcaagttacattgcacagaaagttttgaattgattattgatttcttgacaaaggaatttgattgaatacaagattcttggtttcaaaaatgttttttaaagtgataaagatcctgtggaaagtctgatttgaaaattttaatttaccaaggttcaaccaattcacgcccccctcttggttgttttaaagtgttcctatcattttcaagatcctgtttattatctgaatggagaaaactaagctcctcagccacgatcttcaaaaatcagtgacattgttttatatttctttaccgctttgtagtttaagatttagtatgttgtttctttatcatgtttgatatttgcttaaattaagtgtgtgtttataattctttttggtatgacgcactctgattgtgtacacagagtttctttctttttgaaagtacatattttttgtataaatatttttgggacttaactgacatacatgttttcaaaagaatcaacatatttttgaaacttatttttatattggatcagaacaccacaaaatgattttggaaactttgagaatgaaaaacaaatgaatgggttttcaaatatcaaatgaaggcaagactttctacatggagttgataaagaacatctttcgaaacattgatttgatttgaacatgaaaacagactttgagcccgagtgtgtgcaaccacataaattatattgagtaacctcactgataaagtcaatagttgattttgcataaatttctaattgtcataacatatgatgcatggatatgatttaggccttctttcttattaaacatctttttaagccactggccaaaaagctatcccaacatacttaaatgattaatcctttgtacaacccctttgaaccaaacacttgatattttgttagaaccctaacctaggataagaatttccctaccttacctaaggttaggagagcaaaaagggaatattttgttgatggaaaccttttgggtagctcatgtgatgcaaaagatttttaaaatgtggatatatgttattcatgtgaaagaaaaagagaaagaaaaagcaaacaaagttccttgtgttttaaatgatacaaagttgggtgaatgaaaagattgataaacatggatatcttggaaagaaaaattggaagtgatgatctaattgttttatctttatttgctctcctattctcaaggtacttttttgaatatctagaaaaaccaagattcctttctagccaggcccaaccctaaaagtcctaatgatccatgataattatgtactatgatttgatgggaaatgaactgcaaaattgatctatgatatatcagtgatggaattgagattaaaaacttacctgtgggagaattaaacacattttgagaagttttcctctgtttaaaacaataaggtgtttcctttgatgttctttagaaatgaaatgtgaattgatcttgatcttcttttgtttcaaattcttgaggttgactcatttgaaacatgttctgatcactctgaaaagttgattctttacaaagcatgttcatcctctatgttcctattaattatagtgttagttactttgcttgaggacaaacaagattctaggttagggggagtgataagtgttgatttgaggggaagttacttgaagcataaagagatttgaagacatggaagtattttgagctttcaacatggttgaagaattgaagaaaagcttgtgatcaaatgtaaaaggaaggaagttttctgatgatccaagtcattgcattcatatcattcataagctgaagaattaaatcacaaggcattaggaaattgttttgaatcttgaaataaactaagtgtttttggaaaaattgcttttcactggtttaatcgattaatataagtaaagaaccaattattttgttcttaatgctttatggaaaattctcatgaacagcttaatcgattacactatcgaattaattgattattttaacttagaatatacataatctgcctttgtgatctttttaatcgattactactgagctgtaatcgattacattactcatatagaaaatatcatcactctggtataatcgattaccatttattgaaatcgattatttagttcaatgcatgattatcataatgcctgctttaatcgattaccattcattgtaatcgattacatagtacaaatacattttttcattgtgcctggtttaatcgattacacgcgggataatcgattaaattgctcgttgttgctacccagaatgtttatgaacactttaatcgattacagaagtgtgtgtaatcgattacatatgctaaataatcgattacaggagcacatttaatcgattacaggcggttacgataatctttataaattgaacccatgctcaactgacttcccaacttgagtgattcgtattctgagcattctaaggcattctaaacattcacaaagtgaattttctgggttcttaagttcttgcttccattaaaactcatatgggtcttaaggattgagtgaagcaagattttcttttcaaagtttaaggaaaggcatgttctgagtttggtgtttgcattcaacctggtaaattcattcttatgcatatcatctttggatcatcaggtgatttctttccttactctttcagtttgtaattctctgttgaatcttgtatttgattttctattgtaagtgggtttctttcatgaaaactagagatagtgtttctctaggtgttgctaagtagtgttctcagtttgggtttagcctctaagggtctaatagtgttttagacttttgaactttatctagggttgataaagagaggcttgtattttcttgtaagaatagtatttacaatagtggaactctactctagtgttgagtagaagaaaactggatgtagcttcatagtgtttgaagtgaaccagtataattcattgtgtgtttgtctaattctgcttatttgattgctttatgtgaattcttgttaactgcttgattcttgaagcattacatctcttgggttgatctttggataaaggttctaggttgtgtttgtgataaagatccaaaaaggcaaaaactctgattttgattaataaattttttaaaattaccaaggctaccaattcaaccccctcttggttaagtgtgaagtgttcctatattttacaataagtgccctaattcagttaaatccatgattcaaatgcagggacttatcctttgatttcagaggatttgattataaatttgccctaaacctagttaaatagcacctagtgcttgtataaaagttgttgttcatattttggaagattaatccaatcatgctttatattttgatagattccatggatttccgaggcttctgaataagcaaagcaaacaagaagggctcaaaagattaaacctgggaggtgttacaagcaaacatgcccacaattcatccaagcccaaggctttcttcagagttaaggctttaacttgcccagccgaccatttccagtgtatttggctcgcccaggcgagcaccaagctccaaggagatagacattagcttgcccaggcgagcaaacaaaggcaaaatcactcgcctgggcaagtgaagctggcaggaggaagatttctataaatagccaacgaaaatggaggagaaagcatgccatttgcttcattcttgcttcctttgttattccttaggcttaggagcttaaatattagtaagtaggtagattaggaaagtgagagaagtgaggattagtgtggagactctgtcgaagagaggcggtgatggggcccttcagtaattcttcccgtgaggaggttctctctactatgagtaactagcttctctgaggattggatgtaatcttcttgaccctatgcatctcttttaatatttatttatgcatgaatcatttctattccttgttggtaatttcattctgtgtttaatgcttgattttacttgatcactaatttcatgaatttaatcctaagtgagactggaaagtaatcttagggtttgaaccgaatgattttactcattacattgcgttgctaggaataagacataacgttctgattgcattaaacacgcgattataattcttaatgctaggtatttacttcatatgcaaggaatcgatattcgatagatatccttagaactcgaatacgagggatcgattcggggtaaagtagtgtgcatcaataaggataggcgatgatttgtgcttggtaatattaattggatataaaaggataagaatgatgaaacccaaacccactttctcatagatatatttcatttactaaagtttagtaattttacattactttcacaactaaatgaaattccgcttaacctacttgtacataactattgaactgtcgaattatatttggattaactgagtagctcaagtccctatggagacaatctttataaattttgtaacttacaatgacaaatcgatgcgcttgccgagagtcctaacactgcttcagcttgctcgttggattgtgggtgttctaccgaagcaaaataatgtttgatctgaaacctgaccatcatctcttgaaattgtttatcattgaattgagtcccattatctgttacaatttcacctgggattccaaacttggaaatgatgtttcgttcaaggaatctttgcactcgagccaacatgatggtggcgagaggttccgcttcgatccactttgtgaaataatccactgccactatcaaccattttagttggccttctactgccttgaatggtcctaacagatccatccccacttaaaaaagggccatggggccaaaataaactgcaactcggcggggggagaccacaacaacttggcatgcttttggcaactctcgcattttttgatgtgccttgcagaatcagcttccattgttggccaataatatccaactcgaagggcctttcttgctaatgccttagctcccacgtgttggccgtttacgccttcatgtatcttggtcaacacgtacttgattctatccgagttcaaacaaactagcatcggggtgtgcaatcctttgtgatacaattcatcttctagaattgtgtacatagctgcatcgcgtaccaattttctggcatctagtacgtcattctgcaatatacccctttccaggtagtcaatcgtaggcctcctccaatcttcaattgccgagattatcattaagaaagttgttctggaaatttcctgttgaataataatcctatggttgcctgaactcttagtacttgctagttttgacagaatatcggcccttgaattttcttctctggggatatgactcataatgacctcatcaaaatcaacaataacttctttgactttgttcaaatatttggccaataagggccccttcacttgatatcgcccctcgatctgagttgtgataagctgagaatcagtgaacacctttattttcttcgctccctgctccttcgcttgtaacaacccgactatcattgcttcatactcatcctggttgttcgacgttgggaaatttaattgaagagattgttcaatggtcaccccttccgggttttcaattatgatcccggctccacttcctttcatgttagacaatctgtcgacatataatttccaaacattttctgaatcgccactagccgtggttaattccatcacaaaatatgccaaagcttgagatttaatagcatgttaggattcgtatttcaaatcaaactcggacaattgtattacccagtttctcatccttctagccaaatccggtttgtgtattacttgccgaattggctgattagttctgacaataatcgtatggctttggaaatatgggtgaagcttcttcgtgactaccaacagggcaaaggccaccttctccaacctttggtatcgtaactcaaactttcggagggtctgacttacaaaataaataggcttttgcgttttgtgggcttcccttaccaataccacactaatcgcttcatctcccaccaataagtacaaattaatatctctccaggtttcggtttcgataatacaggtggggaagccaaacatctctttatctctttgaatgccgcctcgcaatccggattccatcctacactagcctccttttttagtaacttgaagaaaggaagcgccttctctgctgatttcaggaggaaacgcgttaaagcggccaatcttcccgtcaattgttgaatctcctttttgttttttggaaactgcatgtccagcatggttgtgcatttatccgggttagcttctatttgttgaattgagggggagcaacttgaagaatcaagcaatgttcaagagttggaagttttggctttcaacatgactcaagaatgaagattgaagcttgtgattaaatgtaaaaggaaaagaaagcattacgatgatccaagtattgattgcatatcattaattcattatacaagcattgcatcatttagatcttaagaaattaatttgatattgaagaaaaagctaaatattttggaaaaatagcctagaactgttttaatcgattacttgatcaaaggaatcgattatcttgttcataatatttctggaaaatcaaacatgaacattttaatcgattaggctatcgtattattcgattatttaagccttagcatacttaagattttaccttctgactggtttaatcgattacatgcttagttgttatatacagtcattcgagtttaatcgattaccacttcttgtaatcgattatatagttcaaaacatgttttacatgcattctaacttagtcgattacaaatagttgtaatcgattatttaagaacacccagttgatgcttgctctggcttaatcgattaccatttcttgtaatcgattattttacttaaacatgaaatagtgctcagactaatgtaatcgattacactacgggttaatcgattattttacccgtttgttgtaattttggaaaatcaagagtcgatttaatcgattacaggagcgtagaggagcggatttaatcgattaaatctgttacatttttaactataaatagaacccttggctttagtgattaaaaaaactaacagagattaagattgaacaaaaactttttgatattctaaacattcaaaggtgtcactaagtcttcatctgggtttatagtgtcttgcttccattaatccattgatgggtcattaagtatgctagtgaggcaagcttgttgagtcacaaatgcttaggaaagctttatgcatcataagtctgcattcaacctgaggtttttcattcatattcttttatcttggatcatcaggtgaattctttccttaagctttgtgaatgtaaagttttctgcagtaactttgtatgttgtgtttctattgtatttgggttttcttgcaagaggggatagtgtttctcctagggagatagggtttctccaaagacagctgagtaggtttctcagtgtgggtttggcttctaaggatctaatagtgttttagatctctgaacttcttctagggttgaagaagagaagcttgtaattgcttgtaagaaacatatttgcaatagtgaaactctactctagtgttgagtagaagaaactggatgtagcctcataggttttgaggtgaaccagtataaatcttgtctcttgatttatattctgcagtttttatcaattagtgtgaattctgtgttgtgtgcttgaatttgctgcataacaaagtcttggattgatcttggataaaggtattcattctgggtttgtgataaagatcctaagggcattctaactctgattttaaactctgatattgaaagaaagttttttaaattccaaaggttaaccaattcaccccccctcttggttaattgtgagtgttccttatttttaacaattggcatcagagcagggtcttgtaagatactcaagattactgcatttttcttaaaatgaacagctcacaaataacctttaaggaaggagcatccttaaacagacctcctttgtttgagggggagcatttcagcttttggaaaaatagaatgaagatctttatccaatccaatgatccaggagcgtggaatgctattgagaaaggtcctagagtacctattaagatggtagataacaacatgattcccaaagattgggatgagctgaatgatgatgaaaaaagaattgttcaatatgactttaaagcaaagaacatgataacttctgctctatcttctgatgaatttttcagaaccgttcgatgtgcaaatgctaaggagatgtgggaaatgttggagatcacccatgaaggaactgaggaagtaagaaggtcaagaaagcattctttgattcatgaatatgaaatgttcaagatgaatcaaaatgagagtatttctcagcttcaaacaagattcacacacatagtaaatcatctccttggacttggcaaaacttttgatgctgaagaactcaacatcaaaattctgaaatgtctcactagagcatggcaacccaaagttacagctatcaaagaatcaaaggatttatcaaagatgtcaatgactgcactttttggtaagttgcttgaatatgaatttgaattatctcagctaacctttggtgaagatgcagataggaaaaacaaaggaattgcattgaaatctgcaacacccaaggacgaaaaggatgaggactctagtgaagaagaggaagatgaaagcttgaacttgatggtgaaaaagttcagcaagtttatgaagaaaaacaagggcagaaaattttcaaggaacaacaagagcaattcctcaaacaacaacacaatcagcttcaagaaattggacagtagctatacttgctttgaatgtggcaaatctggtcacattaagtctgagtgctccatatacttgaagaaacaacaacaggacagcaaagggaagaaggaattcaaaccaagaaaagcatatattgcatgggaagacaatgactcctctaccactgaatcttctgctgagttagaagaagcaaacatgtgtcttacctctatcatcaacgaagaaaatgatgatttactggatgaagatgaagaggtaacttctgaacttgaacaagctattttagcatttcaagagatgcacaaagaagctaaaaagctggctaaagcaaatagcaagattaaaaagaacatagaagaacatcttgccaaaataatggagtttaaaacagaggtttgtaatctgaagaaagaaaatgaaaatctgacttcaaattacaaatcaaatggttgtatgtgcacatcttcatctacatcaagtgacaagtatgaggtactgcaaaagatatttgatgaatatagattcaatcaagaagaaaaatatttacagcaagtgtcaaagaatcaagaattaattgatatcttggaaaagctcaacaagggaaaatgtgatttagatgaaatgttgagtgcccaaaaacagtatggtgatacctctggtttgggatataaaaagaacattaaaaatttgcagaaaaataagtttgttctcccaaagcagcatcaaaagaaaaaggcaagagttaatcaaagaagattttcaagaaaaagatacaatgttgtaacttgtcactattgtatgagaagaggccatacagcttttcattgttttgcaagaagattctatgtcccaaatggtgagtgcatttgggtagaaaagaaaaagaaaattgctaacccatatggacccaaaaaatgggtacctattacttcgaagtaatttgtctcttttgtaggtgtgtctaagagcaagctcatctctttggtaccttgatagtggatgctcaagacacatgacgagtgacatgtctctgctcaagaatgttacatttaaggaaggaggctttgtcacgtatggagacaacaacaaaggaaagattatgggagaaggaagcattggtgacagcttaaacaccaagatcagcaatgtcctatatgtggaagggttgaaacataatttgctgagcattagccaattatgtgacaaaggctacaagatatccttcagccaagactggtgtttgatttgtgacagcaaaagtgatgaggtaattcatataggcaagaggaaaggtaatgtgtatctactctcaattgaccatgctttgtttcacaaaactacatgtttattaagtaaaatggatgaaacatggttgtggcataggagagctagtcatataaatatgcatcatatgaataagctaattaagaaggacttagttattggcttgcctagactcaaatttgagaaagacaaactgtgtgatgcatgtcaaaaggggaaacaaacaaaaatctcttttaaaagtaaaaacattgtttccacctctagacctcttgagcttttacacatggatttgtttggtccttctagaactatgagtataggaggcaattactatggacttgtcattgttgatgatttctccagatttacatggactttgtttttgaaatccaagagtgatgcttttcaatcctttcgaaaattaggcaaagttattcaaaatgaaaaaggatgtaaaattgtttcaattagaagtgatcatgatggagaattccaaaatgaagattttgaaaaattctgtgatgaatatggaataatccacaacttttcaactccaagaacacctcaacaaaatggtgttgtggagaggaaaaacagatcacttgaagaaggtgctagaacactgctaaatgaaacaagtttaccaaaatatttttgggctgatgctgtaaacacagtttgttacaccttaaacagattactcataaggcctattttgaagaaaactccttatgagctgtacaaaggaagaaagcctaatgtttctcacttaagaacctttggctgtaaatgctttgttttaaataatggaaaggaatcacttggaaagtttgatgcaaaagctgatgaggctatctttcttggatattcattacaaagcaaggcatatagagtttttaataaaagaaccatgtgcattgaggaatcagttaatgtaatatgtgatgaatctaatccctcaaaagaggaaaaagtttatgatgatgatgcagaaaatgaaaggcaaaatctgaaattggaaaagatgtctatcaatgaagagaatgaaccgaagactgaagaaagttcatcaacatcaagacaattgcctaaagaatggagaaccacaagggatctttcactagataacattattggtgaagtttcaaagggagtctctactagatcctcaattagaaatttgtgctgtgacatggcttttgtttctcaaattgatccaaaagatatcaatcatgctttgcaagatgaacaatataaagattagacatcactttataagagatcatgtgcaaaaaggtaatattaaggtagaatttattgatacacatcatcaacttgctgacatatttactaaacctctgcctaaggatagattttatactcttagaaacatgctaggaattcttgatgaacacaacatatgttagcatgtttatgatatgatttactgtcatcatcactgctaaatcattatgaaaactgcaataacctcacaatgctctgatttcatgtaatcaaagtataatgcttgaaatatgctctgttcactagaatcaaaaactgtttgaacttgttaaaaagctctgttttctgttattcgtactacattaatcgattgagtatcggaataatcgattattttcattaaaatcacaactctgtttcaaagtcaaagtcatataatcgattacataggcatcgtaatcgattacccttcataagtcataaatggtgtcactctggagtaatcgattaactattaatataatcgattacaagcttgaagaattaatcctgaaaagataaaggacactggactaattgattactcatcgggataatcgattataatgttactgacttagcataggaaatctaggacactctggaagaatcgattacaaccagtgttaatcgattaaaaagttcttaacttaggttggactcttatccatggccaaataatcgattaccttggaatattaatcgattacctatcgtcttcaacctctgaccaactaaagtgtaaatcgattacactgaagaaaaatcgattacactggataaacattgttatatcttttctggaataatcgattacatagtaacataatcgattattgaaactgttacgcgttttctgacacatttttgaaatatgtaactgtcatatcaacgcgttttgtgtcttgaaactgccactaacttgtattaactatgtttaacagctatatttttaaattgtcaaaaattttgtgcttaatcttggcctataaataaggtcttagtgattcatttttttttgcaccctttcttgctctctaaacatcatttcttcttcttctcagataaccatttccttcagtatcaaatttaaaatgtttgcaccaaggagggttaggacaggtaagagaaaggtaggtgagtcatcctctaacccccaaactcaatcaccaccagataggcttagtatttggttcacaaaagagtaagaaaaaatgacttaccttcagtttaatgcaaccaagcccatttgttctcctaaatatatcagtttagattggtttgttcaagaagggtttgtgtttcctatcttattagagacccaaggccttataagatttatggaaatgaaaggtacctattaccttgatctagtgaaagtcttttacacttgtggtaaagcctccatgcaaggatatttcaaaaccactgtaaaaggagttgacatgttgatcactcctgaagtttgggagacagtggcaggaatagtcaatgagggggagaggaagtttgtggaaaatcctgagggctatacaaagataggcacctatagagattgtctaagtgatccaaaccaacccattaggaataggttaagcactggccctatgtctcctgaaaatagacttcttcattacttaatcacctatattcttactccaagggcaacaaatcatgcccaagctactaatgaggacctgcaactcatgtatggtcttcttaactctatcccaatgaattgggttcttatttttcaagaaatcatgatgaagtccaagagacttatcaattatccctttccgtatcctattcttgtgtcgagattcatagattactttggtatagatgtgtccaatgaggtggtagatgacaccaactcctcaaatagcctgatcaaagaaaaacatctttctaagcttggtctgcacaagaccccagatggctgggtaatgagaggacaaccaccactgcaaggacctcaacagcagcaagaacaatttgtagctgaaagtgaggatattagagattcagcaagtactgaagatcaatcggaacaaccacttcacactcaatttgaagcactgatgctggcaaaggtggatggtctcttacaaatgcagcatgactttcaggctgaagttaaaggatcgtttagagaaattaatgaaagattggatgatattgagtctactcttaggatggatgaagagtctgtagaattttagaccttagtattttatgtcttaaacttagtttttatgctttcagtttcagttcttgtactctgtttctctatcttttatttcagcatcttaatgtactcttctgtctctataaatggaatatatgctttctgttcatcacttatctactgtgatttcattttttgactttaaaaagccaaatagggagagaaaaattgaaaatcaaacatgaaatgcaagtgctctgcatcatactctgttcacctctgtttttcatgtcattttttagtcaaaatttcatatgcataaaatgtgaaattaagggggagttaagggtcaaaactaattgctatatgttagaaatgcataatgaataaagctcaggtacgtttaacacttgttcttggaaagaattattggaatttcaggtatcaagaaaagtacaggaacatgaaaagcttttccattcaatcacaaagacccattgcttttcaattggagatttggcatgtttaaagccaaaaagggggagattgttgaattgagggggagcaacttgaagaatcaagcaatgttcaagagttggaagttttggctttcaacatgactcaagaatgaagattgaagcttgtgattaaatgtaaaaggaaaagaaagcattacgatgatccaagtattgattgcatatcattaattcattatacaagcattgcatcatttagatcttaagaaattaatttgatattgaagaaaaagctaagtattttggaaaaatagcctagaactgctttaatcgattacttgatcaaaggaatcgattatcttgttcataatatttctggaaaatcaaacatgaacattttaatcgattaggctatcgtattaatcgattatttaagccttagcatacttaagattttaccttctgactggtttaatcgattaccatgatgttgtaatcgattacatgcttagttgttatatacagtcattcgagtttaatcgattaccacttcttgtaatcgattatatagttcaaaacatgttttacatgcattctaacttagtcgattacaaatagttgtaatcgattatttaagaacacccagttgatgcttgctctggcttaatcgattaccatttcttgtaatggattattttacttaaacatgaaatagtgctcagactaatgtaatcgattacactacgggttaatcgattattttacccgtttgttgtaattttggaaaatcaagagtcgatttaatcgattacaggagcgtagaggagcggatttaatcgattaaatctgttacatttttaactataaatagaacccttggctttagtgattaaaaaaactaacagagattaagattgaacaaaaactttttgatattctgaacattcaaaggtgtcactaagtcttcatctgggtttatagtgtcttgcttccattaatccattgatgggtcattaagtatgctagtgaggcaagcttgttgagtcacaaatgcttaggaaagctttatgcatcataagtctgcattcaacctgaggtttttcattcatattcttttatcttggatcatcaggtgaattctttccttaagctttgtgaatgtaaagttttctgcagtaactttgtatgttgtgtttctattgtatttgggttttcttgcaagaggggatagtgtttctcctagggagatagggtttctccaaagacagctgagtaggtttctcagtgtgggtttggcttctaaggatctaatagtgttttagatctctgaacttcttctagggttgaagaagagaagcttgtaattgcttgtaagaaacatatttgcaatagtgaaactctactctagtgttgagtagaagaaactggatgtagcctcataggttttgaagtgaaccagtataaatcttgtctcttgatttatattctgcagtttttatcaattattgtgtgaattatgtgttgtgtgcttgaatttgctgcataacaaagtcttggattgatcttggataaaggtattcattctgggtttgtgataaagatcctaagggcattctaactctgattttaaactctgatattgaaagaaagttttttaaattcccaaggttaaccaattcaccccccccccctcttggttaattgtgagtgttccttatttttaacactattcctctatggattaacatgaaccctaggaattttctagttgagacatcaaaagtgcatttaagcgaatattatattccccttaacctgctaaatgtttcttacaagtcctttatatgatcgttcatagtggttgtctttacaatcatatcatcaatgtagacttcgatattttgactgagttggtgctcaaagaccttattcatcattctttggtatgtggccttcgcgtttttcaacccaatggtcataacattataacagtagtttgcattatcgcctataaaggtcgttttttcctaatctgttggatacatggctatctgattataccccaagtaagtgtccataaacgaaagtaaccaaaactcgaacaagttatccacgagttgatcaatatttggcattggataggcgtctttagggcatatcttactcaagtcattataatctatgtacaccctccatttgccattagatttctggatcattactacattggataaccaagtagtgtactggatttctcgtataaacccggcttccatcaactctttgatgtgcgtggctagtgcttgagttcttttgggaccaagtttccattttttctgttggacaagctttgatccagggtacatcgataatttatgacaacaaaattttggatctatccccagtatttctgatgctttccaagcgaaaacgtcttggttcctcttgaggcactccatgagtttgactttgacgtctgagtcaaccatttttccgatcttggtgatctgccacaattggtttcctatttgtaattcttccacatctccggctggttctggtctcctttcctcagagttttccctcatgtcaagttctaccatatttactggtttttcgggttgacgctccgccattttatagccgacatgatccgcttgacgtatccggggtggtgaagatggaccaccctcactttccttgactgcattgtaataaaattgtcgggattctttttggtcctcgcagattgtcaccactatacccttgttccctaccatttttatcttttggtgtttagtagacatcaacatatcccacttgtggataggtggtgttcccaaaataacattgtacggttagggaaagtcggccacaacaaacgtaactctttccgacttgaatgcatctttagttcctaatgtcgtccgaaggtcaatggaacctttaggattggtattttctccattgaagcctatcaacattgtcttacatggtttcaagtcctcttcgtccaaattcatctttttgaatgcactccagaggataatatccgcaaagctgccattatctacgaacatccatttaactcgacaattgaccagtgttccagtaattactaggtcatcttcatgacctggcaccacacctttcatatcttcctttgtaaaatataggataggaggctttggtttgccgattttccctttaaacttggctgctctctcaccgaaaaaatttctttcaaatacttccgtctttggttagcagtatctcctcctcctcctcctagagctctagaaatgacaatatactcaaactccggctctagaaattcatcgtcatcggtctgttttttcctcttgtcttctttttctttcctgggttaaacttctccacctttgtgcttgttcttacgagcctgggtctttatcacgtactgcctcaaccttccctctctaacgaatttctcaatcgcgtctcagagatcccaacactggtcagtggtatgtcctggcttgttgtgaaactcacaaaaccaggattaatctaccccgaccttgttatacaatggacggggtcgctcaccttcttcatgtcagtcaaagctacctccttccaaacttgtgaccgagatatatttaatggcgtatattttttgtattttgtttcatatttccctgacctgaacttaacatttgggtttctaccttaattaggaattccttgatgttgcctacctcttgatagtggacacctccttctaggacttctttccttttctctacccattgcattagcagtctccatctattccaactccaaatactttttcgaccgggctcgaaattccaataatgattgcaccgggtctttatatattgacttcgccaatcgggatgatccactcaatccagctgagatgaggtgtacgtgtactttttcctccaatccatgtacttgcaacgctgcttccttgaaatgatctagataactctataatgtttcgccaggttgttgtcgtattttacccagtgcgaactcagatttcagttgttttttactagttgcagagttcagcaaaaacctctggccgaaatcttcaaaattgccgattaacagcagtggcaacgtatggaaccacgtctgggtcggtccggataaggtcctagcttccgtcgtattttgataaaaaagaaccgtcaaaatcctccaagtatcgggcgttaacaatctcgtcagaaaaatgactattgttgtgttatcctttaccgtatttcctccgatacactccctcttccatccttatccgaggtgcaacttcaatagtaggattttggactatcattcgggcttgacttgtctgcttcatcccggtgttggcaggttgggttggagttgtcggttgtgcatgcatcatgttctcactgtcctgatacaccgggttatgatttcgaacgttcactcgagatgagcccccgatttcaaatcgacttactggtccttccgaattaacgggaattgcatgtatttccacgggacgatttgttggaacaaccgggacctgactggcctggtagtttatcccattcctggttgtatggttgtcctgctgtttgtgatccgcattatggaccgggttctccatatttctgagacgttgtttcatgcgttgtatgcgctgttcttcttcgtgtttccactccgcattacgttcctctatctggagcgtgatatttctgatgtcctcccgcctttgaagggcatatcttctctccatattctctattcaagccaagattgaatttagagcgttattcatgagatgttcagcaggctccggttcaagggttgccatgaccgtcagttaatgagccgggttcaactgatgagcatcaggaattgcccgtcccgctggagcaggagacgaggttgagtctgaaatcgcattgctcacatgcatagcttcgtggtggaccacattctggttgccagggggtaattcacctcttccacccgcatgggaacgtgggtgtggagtctggttacttctagtatttaccatcgtgaaccataggatttgaactttacagtccccacagacgacttcaatgttctgtcttttatgaacatgtatgtccaacaaggatgctggtgattttggtattggatctagctctctcctaaggtatttatggaagagaaatacctccagaaatatgaccactatgcatgaagcaatactcaaccaatgggatgaggtgtgtgcacagtgttaatagaaaagatatgagagaataagtaggtgtgtacttttttcctctgaaagcagcccttatttatactagacttacctctaggtcagttgagaattctctctgatatgcttggtcaatatctctaaccgcctaatattaatatctttttggcagttattatatttagggtccacgatcttctttgctattatattcagcagttcaaagttttgaattcttaatggaccttaacgttgagtcaatatgtcgaatccgtaacatatgcaacatatctttttgtcggtttgcctaattcaaaagcgtgtaactgtgactcaacaactgttaaagggtaaaggaccaaaaagtaaactgcaaaattggcgaattttatcgtaatgtcagatttataatcatataatgactgtactttgaaaaaactgcctaactatctttagcttaaaattaaaattgcgttagcagcaaaacaataatgcttgttgtttttataataaatataaaaaataaaaataatgcttgtaactcctttgttctcagacaaagaaacccctttgttcataatgtaaaagacaactttacccaaacaaatatttattaggcgaaaagaaagggagatattagaaaatgcgcatgatttaagttttgatttcctttcaataaaattacagatgcataaacatatgcaatctcatgttggtttagttgataaaaaataaacttatattctaataaaatgtgagtttgattttctttctctatataaggatttattgatgaataatcgattattttattggtggataatcataatatatatgtaagtttctattaaatattttttgagtcttgacatttgtatgatgaattcctgatatccaacttacttaaaccttttgtgttctatcaaaaaaaatatgcaatcacatagatcctataatttattcttggtttaacaagaaaattatgttgtatttgaatattttttgttattaacccacgtttgaacattcaaaatcaggttaggtaggttaagcggttaaggctttaagcttttagagtgtacttggattacacttgcatctaactaaacccaatggaactcaacgaggatcaataaaaatatatttaatttttaaggaaatagattaatgcaaaaaaatttatcaagataaaattaatattttttaaaattttacagaaattcaaatatatttgtgatcttaattttcaaactcagtgagcaatcctttactaaaagtttttttaatatttagaaactagttgagtaattataataaggtaaaattgtttatagttcgaacgtgtccagtaatattttagatgaatctcttctagaagtcttcacataccatattatataccatgaggccttgtctattaatatttagagtttctccgttctaccacttttttatgaaaaagaaatatttttcttttcaaatttaagagaatcataaatttgttatatataaatcaatcaccattctaaaaagaatattgacagcaacataactaaagaaaggacagtttgtcattaatcaatttcgggtaatgatggtgaggaaataaataaaaaccaacaatcatatcaggaccatgacaaagtagaactatatacaatgtattcttatgaatcaacgatcaaggttcacaattcaaaccataatttaaaccaatgcttatatgagaatcccaatctctactcaaactccaataccaaagtggcattgtgtacaaatgattaacttctatttcctactaatgaacatgtcaatggaaaccaataaagcataccattttttccctaatatacacgatctcttgcatgtagaaatcacaagtttccctagagagaactttcagaaactgagctgggtctctcccttgatgaagaagaatgtaagaactcaatgcaatcttcaacagctttggcacgatgtgaatcaggggggtctgacacagaacgtgttctgaccaaagaggatgaagaaaccttcctagaggatctccttttcatggaaacaactcttatagcacttgccacttttgctccaagttgctgcaagaatctcacaggtgaaaatttagggtcttttggaaatctaaaagtccaagttcctgtgaccctcttcttgtttccactatcaccaacacttgtttgcttgagaaacatgattggtttctcattaaaaccaggagtgtagaacaccttttcagttgttctcaacatcatgagaaacaatataataaaatgcaaaataaaaaactcaacaatttcaatgtttgtatctatttgatatgtaagacagaaaaacagaaaggagacagagagggaatagcagtaaaagggaacaatataagacagtaagacactataggttgtcacaggagtgtgtatatatatagataaactaatttaaggaaacaaagggatagtatagctagctggtggttcaaagttgaagcctagaaagtgatgtttcaggaacatataattaaagacatagataaggatgtttcaaactcatagcttcaacttgataaccttgagaacaagcaatcttataccagagggttaagtgcatataaaatcattcatatgtgatataggtacgtgcatgagacatgcacacatgacacatgggcctattacggaatctaacacattaccacatttattgtgggtagtagctaggggggtacaattattatgctatctgtggctgttgtgttttataggctaagcataagcatgaactatatgatgtgaattgtgtggtatggttaatagatatttatattggttaagtattcaattgctcgttggaagagataaaacttttaaataagttttaatattttaaaatattagtgaatgattttaggtctaaaatatcttatattaccaataaaaatatcaaaatattatattgaatgaccaacatgtttttagtttaagtgatattatatttgaatattttaagtaatattttagattcaatgagtccgatggataaaaagaaaataaataaataaataaataaataaagacattatactaaagtttatcagcaaaattttttgataatttttattcataaactttattaataaatatttcacataaatatgattgtaaaaaaaatagctgagtttgtccttttctttctcttagatcaagaagagaaaagggagttttggtcaaaagaaaaagtagtggagaaacgaagaatgaatagggagacaagaaagaaactgttgaggaggttaaaaaaagtggtaatggatagatatagagaagaaggaaccgatggatactcttctaatcggcgttacttttgaggatgtatttatcgcagggtctacttgctttttttctgtatctgaaatctgaaatctagatataagggccccaatattatgtgcagtgagagaaagaggggagagagaatatatatgactttgaccgtggagtaggcgtaaaaactatggcattggttatttatcgtttttctattctctggttggaattgggacattcacaagacaaaaaatgtgggagtggtgcttcatacaccatgtaaaacttctactacaccattttttttttaaaaataccaaaactgcccttgctggttgtggacggtatattactgagcggcgcagctttgatgaccatttcctacatctcttgcataagcagtggtgatttttgttcgccccagttgccagttgatacgcagtggtgattttggtgccggagtcgtggttgtcgtcggagctgttggtggttggcggagccgcgaagacgcgactgaaccgtgcaaggtaagtggaggcagtggatcgtacggattcggtaatccgtatgggttatacggattggtcaatccgtaaaacccatacggattattcaatccgtatgggttttacggattgaccaatccgtataacccatacggattgaataatccgtatgggttttacggattgaccaatccgtataacccatacggattaccgaatccgtatggcttggtttgctgaattttggcaattttctaaatgttggaaatatgtatttgtataaaattgagttttttttgataaatttgttgtattgaatgaatatgttgatttaattgttgtgtaaacataacaatgataggatttatgaatggatttgttaggatggacaacgatgaatggatttatgacagcataatgtcagaagaagttaatatggatgaagacattggagcagacgctgatgcgtttgaattcaatgaaaacaacggtgtggaccccaatgcgtttgaggataatggttgtttaattgattgttctgcagcttttgaaaccaatgaggtaattatgtgtatgttaatgtatttaaagttgttatatcattgtatttgggatattaaatatgaattatcctttgcgtaggtgtttgaatcacgtgaggcggtattgaaatgggctcgtaccactgcgtttgaaaatggttttgtagcggttataatgaggagcgacaccaaaactggaaaaataggaagaacgtcctttgtattaattggttgtgaaaggagtggaaaatatagagcatggaaaaaaggtttcacaccctcaaacaccagcactagaaaatgtgagtgtccttttaagttgcggggtaaaccgatccctggaggacaggggtggatggtgaaggtaatttgtggcaatcataatcatgaactggcgaagtcattttgtggacacccatatgctggtcgaataactgaggaggagaagaccattgttggtgatatgacaaggtcgatggtgaaaccaagaaatattttgttaactttgaaggaacacaatgccgacaatgtaacaagtttgaagcaagtttataatgcaagatatgcataccggacacgtataagaggcgataattctgaaatgcaacagctaatgaaactcctagaacgcgacatgtatattcattggcatcgagtaaaggatgacaatgttgtacgagatttgttttgggcactgtaaggaccctctcggtggcgctggtggcgccaggtcccgcgcgggtagcgcggggaccttcgttggaaaaccctgcagagggtgtggcgcgggtcgcgccacaggtgacgtggatcgcgtgggatgaggcttaggaaaccagattcttctctggtatcccacgtgggtcgcgtgggggtatggcgcgagtcgcgcggagactcggcaggctcacgcgagtcgcgtgaatgttcacgtacctcgcgtggaaggcccgtaggtatggcgcgagtcgcgtggtaaacggcgcgagtcgcgtagtttgttatggcgcgacgtgcgtggtttcgggcgcgagtcgcgtgggaaggtcggtgaagcttttataagaacgaaggtcgcgtttttcagggggaaaaaccctcctcctccttccccacggccctagcagccattagaggcctccccaagctttctaggaccttatatcatggcctaaacaccttcttttggcctttgatcttgagaggagcccttgagagcgagaatccttcctccctattccctaaaaccccaagttctgaaaaaccttcagagaggttgagagaactcgagattgaggaggaacggcgactacccacggacaccggagctaggaggaacgttccagaggttatctgtgtcgccattgaggtaagaaactcgagttcctccggttgattttctgtttgggggttttgggtgaatagtgacccatctgtgattgggctagaattagctctgggtccagttgagagaagtgtttagaatgatgtgaggaggaaggattagctttcaatttgtgaattggagaatgtgagttctggctctaggataggcatgggtgactgtggttgagtcacttgatttggaacatgccagagcctgaatgatgggctggcggtgcctgtgaggccaagggaacggagtctagtggattagaccgttcaagccctgagaaaccctgtggttaggggttgagtgagctgagaagctcagtttgatggctgaggctgagtctgtggttactctaaagccatggttgatctgtgttagaccactgaaggtctatagaaaggcttgttgtgtgatgagcctgaggaaccttgggcaggtgacctaagttgatggagaggattgtgattcctttccctgaggcaggagtgactgcctgatgagctttttgggttgttaatatgctagtatggtctgtaatgtgctgttgtgtgccttgacagggcttgacacttagagtgtcagtgaagcagaccatcaagccaggagcagagctgtgaagcacgactaagagaggtaagctcattgttctggggattcgtcccttttcccttggttgccaccctgatgggtgatgtaattcatgccatgtgtgtgtgagcacatgtatatatgtgtatgtgggcatgctgtttggatttgaaggccatgcggcctatgttttatgatatatgctatggcctagtgtgtgctaggctgaaatggatgaaccctaggatagtcacctgctatagtgaggctaaagagacacctgatcagtcaggtgtaaggccgtgggccatgtgagtggatgcagaccatgagatggtctgtgatggaacctataggataccgggttggtatcgggctagctgaggttccctagccagaggaagggcttgaggactccctggaacggctggtattccatgggaggtgccactgctctccagttaagtcctaaggactgttgaacctgtgtggaggttcttccttaggcatttgagttgaaagacctgtggatggtgctcccgtagtggaatgacttcccaggcaagtgatagtgacctgcggatggtgcctcctgtgtgagatgacttcccaggtagtggaaaacccgtggatggtgcctcctgtgtgagatgacttcccgggtaggggtatgacctgtggatggtgcctccgtagtgagatgacttcccaggtggtgagcagacctgtggatggtgcctccgtagtgagatgacttcccaggtggtgagaagccctgtggatggtgcctcctttgtgagatgacttcccgggcggtgaaagtcctgagtgccggtgcctcctgtgtgagatgacgcctcaggccagtagtggaaagtcctgagcgacggtgcctcctttgtgagatgactcctcaggccagggttggaagtcctaagagatgtgtgcctcctgtgtgagatgaactctcttaggcatgtgagtttaagtcctgaggatggtgcctcctgtgtgagatgacttcccaggcagatgatgtaagccctggatggtttcccaggccagttagtgacagatatgttgtatctctaagagagggcttcccgaggggattagagcctagagcctcttagatgagccatatctggatatgtgaagtcctgagtgatagtcctcaggcattgtatgattagtatgagacggtgagtctcgggttgatgcagtgtctagtgggagacactgatggtaatgtacctctaggagacaggctgcggaaaagccagagttagatggcggggccaggggcatggtctaaacccctgataggtggctctaggagccagtgagaggtgtagacctcagatgccatgggcatcccgtgttatgatcccagactgctgggagtgtgtgtatgagcggagaatgtatctctagctcttttctctgtttattttatgtcttggtggtgaaccagggtgagggaggtctttcccaggaccctgagcttgctgagacgtatgtctcaccctgtgtggggtttgtggttttcaggtgcttctggtggagcagagaagcgacctcagggcaggaggccctagtgaagatatcaagctggaggaggctgcagttgaagaccggtgcagagcttccagagtgggagctggtttaggtcggttagagatagggtgtgtgtacacccgattctgtacatattttataaatgaccgcctgtggtcatgtttttgagcatgtatatgtacaattgtgagatggtattggttatgttttcatcagagtatatttgtataagttatgtatctgcctattgtgtgtgtgttttatctggatcagtgtttgttgttttatgctttggttgtgttttaaatttcatacataatgtaatcaagataaacgatcttgtcgcttccgcacaccgcatgtacaacgcttttagcgtggtttggtatcattaatgttagcacgtccggggtgttacatttaatggtatcagagcggtttcttgattaagacattatgtatgaaatggttggttgcttgatgctgtggtttgatctgacatgagcattgcatatgggtacactatatgtgggcctgatcaactcactgttttgtgtacatgtgcagtgtcatgccgagatccagaagcagcagtggggcaaccccaggtcagtctgatccagtagctgctgcgatggcagccctgcagcaagagatagctgcaaataggcagactcaggagatgatgcagcaagaagtagctgcagctagacaggcacaggaggagatacagcggcagagagctgctgatgtagagagatatgaggccttgatgaaggctcatcaggacctgatagaggaggtcagagtcctaaggaggggtgacagagtatcccctacacctcctgtgtatgagggcgagggaagtcgccatcagtctggtgcgagtcacctgagagaggaccggatgttccctatggagacggagatggatgctgcagcccgagggaaaatgcttatcatgtttcgtaagcatgaccctccagccttccatggtgggtatgatccagttgccgcagcaaggtggctgcaggctatggagaagatctttgaggtgatggagtgttccgatcaccagaggttgctgtatgcggcctacatgttgcagggcgacgcacatgagtggtggaggaccacagcagcgttgctgagaggccggggagaggttctttcctggcagatgtttgaagcctgcttcctggataagtattttcccagggatgctagggagcagaagcaggcagagttcgacagtctagtccagggagacatgaatgtggatgagtatttggctaagtttaatgagctggccaaatatgctcatttcaggagatccatgccagatgctgaggtcctagctgctaagttcctgaggggacttagaggtgatattgagatgctagtggccggcagtggatctcgagacatggacagcttggtgagacagtgtcgccaagttgaggctgtactcagcagatgtcgaggcaagcagcctattttcctgacgggtcagcaagtggatagacccagaggttctgacccaggtggtaagagcagtgagccgggagtatttttgactacggctcagaagcggaggcctggtcggagaaggttactccagagacctgatacaccttcccagtgtgatgcttgtgggaagtatcactggggagtctgctctacgggtcagcttttgtgttacagatgtggccagcagggccactatgctaaagagtgtcctatggaggacaagcagccagagagagtctccagaggtaccagatgagcggtcagaggttgctgaccagagttaaggtatgattatgtacctgttttacgtatatctgttgtgtgtgatctccatttgtgaatggagagtgtatgcttcgcgggagcgttggttgtgagatatggacctccctatgagatggtttcctcctagtatggctggctcatgggtgatgatgatcccggggtgatgatgctcccctaggccaagggaatagtccagatggtttcctgctattctcggaggtaccatatatgtgcatccccgttaagggtagcgtccggtgggatggcacaggtgtgagtcgccagtctcacactgatgttagaagctgatgatgatgcatctgggcgttaatgatgatacgccatggcgtgatgtggatacgccgttgttgggagcaagaagacttgctcatcatgtgatgggaccaggaggtccaggccaagtggccagtatgcttgagatgtccagcagaggctgggatagatgttgatacctcaagcatgatagcatggagatgttccgtgcctggtgataatctctgaccgtgggtagtatgaacaggtcagagatgtgtaattgtctcggacagaggatcctctgatcaccagtgggagtgatcagtgatgatgaggatcagagtgcgcagcggaagatctgtggaatcgatccccggattgagctgcgagagttgttaaccagctaggcgtgtttagggaagcacctggcttatgataagctaaacctagttatggtgcctttagctagctggtggatgccgtccttatgtggtttatgaggactggtcgatagtcatccgagggccactgtgatatgttatatcctgagaggatttcaggtggtcaaggatgagaggagacatagctatgtatatggctagtgtctaacaggtcacttagttagtgacaaggatctgaagtaaccttgagagatgaggtgtacttcagaaaactgggaaccccgtagaggcttcagttagcctattatcctcagatagatgatcaagatgcagtgaggcatctagatcctgaggaatttagatatgtgaacgtaccttagggtagggtacatacggggttagatgtctgccttgatggaggtccttggttgcgatatttcgcatgttcgaggaacatggcacctaatggggctctgtggaagccaatggtgcaggactccagtgtttggcagaagaaagtgttagaaacagcttcgcgaacctgaaatggttcgatggactcgtgagcagatccgaaggggatcaagtgtggtagagaaaggctcagagtcagtggataggatgtttggtccagacacagaaccttgtcagtggacgaaggtaatccgatgtgtctggagctatttcagtcacaggtgtaggatgggcttcgattagggaagaggtagttcccaggttttccagttggaatgatgtggttgtgtgccacagagtaaaggccttgagctgatcagattagtaaatctgataaatcctacacagactgtggtgtatagcgagtcctggatgggactaagttcttagaaaggaattctgcggacagaattcctaaaaaggaggggtgaatgtaaggaccctctcggtggcgctggtggcgccaggtcccgcgcgggtagcgcggggaccttcgttggaaaaccctgcagagggtgtggcgcgggtcgcgccacaggtgacgtggatcgcgtgggatgaggcttaggaaaccagattcttctctggtatcccacgtgggtcgcgtgggggtatggcgcgagtcgcgcggagactcggcaggctcacgcgagtcgcgtgaatgttcacgtacctcgcgtggaaggcccgtaggtatggcgcgagtcgcgtggtaaacggcgcgagtcgcgtagtttgttatggcgcgacgtgcgtggtttcgggcgcgagtcgcgtgggaaggtcggtgaagcttttataagaacgaaggtcgcgtttttcagggggaaaaaccctcctcctccttccccacggccctagcagccattagaggcctccccaagctttctaggaccttatatcatggcctaaacaccttcttttggcctttgatcttgagaggagcccttgagagcgagaatccttcctccctattccctaaaaccccaagttctgaaaaaccttcagagaggttgagagaactcgagattgaggaggaacggcgactacccacggacaccggagctaggaggaacgttccagaggttatctgtgtcgccattgaggtaagaaactcgagttcctccggttgattttctgtttgggggttttgggtgaatagtgacccatctgtgattgggctagaattagctctgggtccagttgagagaagtgtttagaatgatgtgaggaggaaggattagctttcaatttgtgaattggagaatgtgagttctggctctaggataggcatgggtgactgtggttgagtcacttgatttggaacatgccagagcctgaatgatgggctggcggtgcctgtgaggccaagggaacggagtctagtggattagaccgttcaagccctgagaaaccctgtggttaggggttgagtgagctgagaagctcagtttgatggctgaggctgagtctgtggttactctaaagccatggttgatctgtgttagaccactgaaggtctatagaaaggcttgttgtgtgatgagcctgaggaaccttgggcaggtgacctaagttgatggagaggattgtgattcctttccctgaggcaggagtgactgcctgatgagctttttgggttgttaatatgctagtatggtctgtaatgtgctgttgtgtgccttgacagggcttgacacttagagtgtcagtgaagcagaccatcaagccaggagcagagctgtgaagcacgactaagagaggtaagctcattgttctggggattcgtcccttttcccttggttgccaccctgatgggtgatgtaattcatgccatgtgtgtgtgagcacatgtatatatgtgtatgtgggcatgctgtttggatttgaaggccatgcggcctatgttttatgatatatgctatggcctagtgtgtgctaggctgaaatggatgaaccctaggatagtcacctgctatagtgaggctaaagagacacctgatcagtcaggtgtaaggccgtgggccatgtgagtggatgcagaccatgagatggtctgtgatggaacctataggataccgggttggtatcgggctagctgaggttccctagccagaggaagggcttgaggactccctggaacggctggtattccatgggaggtgccactgctctccagttaagtcctaaggactgttgaacctgtgtggaggttcttccttaggcatttgagttgaaagacctgtggatggtgctcccgtagtggaatgacttcccaggcaagtgatagtgacctgcggatggtgcctcctgtgtgagatgacttcccaggtagtggaaaacccgtggatggtgcctcctgtgtgagatgacttcccgggtaggggtatgacctgtggatggtgcctccgtagtgagatgacttcccaggtggtgagcagacctgtggatggtgcctccgtagtgagatgacttcccaggtggtgagaagccctgtggatggtgcctcctttgtgagatgacttcccgggcggtgaaagtcctgagtgccggtgcctcctgtgtgagatgacgcctcaggccagtagtggaaagtcctgagcgacggtgcctcctttgtgagatgactcctcaggccagggttggaagtcctaagagatgtgtgcctcctgtgtgagatgaactctcttaggcatgtgagtttaagtcctgaggatggtgcctcctgtgtgagatgacttcccaggcagatgatgtaagccctggatggtttcccaggccagttagtgacagatatgttgtatctctaagagagggcttcccgaggggattagagcctagagcctcttagatgagccatatctggatatgtgaagtcctgagtgatagtcctcaggcattgtatgattagtatgagacggtgagtctcgggttgatgcagtgtctagtgggagacactgatggtaatgtacctctaggagacaggctgcggaaaagccagagttagatggcggggccaggggcatggtctaaacccctgataggtggctctaggagccagtgagaggtgtagacctcagatgccatgggcatcccgtgttatgatcccagactgctgggagtgtgtgtatgagcggagaatgtatctctagctcttttctctgtttattttatgtcttggtggtgaaccagggtgagggaggtctttcccaggaccctgagcttgctgagacgtatgtctcaccctgtgtggggtttgtggttttcaggtgcttctggtggagcagagaagcgacctcagggcaggaggccctagtgaagatatcaagctggaggaggctgcagttgaagaccggtgcagagcttccagagtgggagctggtttaggtcggttagagatagggtgtgtgtacacccgattctgtacatattttataaatgaccgcctgtggtcatgtttttgagcatgtatatgtacaattgtgagatggtattggttatgttttcatcagagtatatttgtataagttatgtatctgcctattgtgtgtgtgttttatctggatcagtgtttgttgttttatgctttggttgtgttttaaatttcatacataatgtaatcaagataaacgatcttgtcgcttccgcacaccgcatgtacaacgcttttagcgtggtttggtatcattaatgttagcacgtccggggtgttacaggcacatccagatgcagtacagttgactaatgcatatcatatggtgttcctcattgatagtacgtacaaaacaaacaggtacagacttcctttacttgacattgttggtgtcactcctaccgggctgacattttcagctgcatttgcctatttagaggctgaacgcatcaacaatgttgtctgggcccttgaacggtttagagggatttttatgaaaagtgaattcttcccaaaggtgattgttaccgatagagattcagcgctgatgaatgctgtgaaatgtgtttttccggattcaaccaatttattatgtcggtttcacatagacaaaaatgtaaaggcaaaatgtaaaacttatgttaggcaaagccatgcatgggattatgttatggaagcatggggaagtcttgttgactgtgctactgaaacacaatttggtgaacgccttatgcagtttgatgttgcatgtgcaccgtggcctacatttgttgattacgtgaaggacacttggttgaatcctcacaaagaaaaatttgtgaaagcatggacaaacaaagtcatgcattttggaaatacgacaacaaacaggtacatctgttattagacattaattgcattgacatttccattagttaattgtattttaattaattcattatatgacctatatgcagggtggagtctgcacattccaccttaaagcgcctattgcagaatagcattggagacttatgcactgtttgggatgccatgaacaacatgattatcttacaacataatgaaataagggcatctttggagaaaagcatgcatgttgttgggcatgcttttaaagttattttatacaagcaacttgttggcactgtatcgaggtacgctttaaatcaaattgctgatgagtatgaccgagtgcattatgcaggaaaaaacccgaagcggtgtggatgtgtgctgagaacaacacatggtttgccttgtgcttgtgaacttgctaagtatactctacagagcattccaattaacgccgttcatatattttggcggagattaaactttgcaagtgaaagtatgcatgattctgaagtcacgataactgaagagattcaagccatttcaaagcgttttgaaaagcttgatttggttgggaaactgacagttaaaagtaaacttaaagaaattgcgtaccctgatttgaattccatgtgtcctccccctgataaggtgaaaactaaaggtgctccgaagaagaagatgacaaatcacgaaaggtccactagaagggacccgtcatactttgagtatgtagatgaatttcattcagtgcagaatagttgctcaacgccaaaacagtccaattcgtcatgcgatgttcagatgcaacacgggatagttccaatgttagatcaatttcatccatgtatgcagcagttcatcttgaaggtggcggatgtcaaagcagatggtaattgcggataccgcgtaattgctgccttattaggttatggtgaagaatcttggtcattagtacgcaatcatttgctccgagaacttggagattggacagatagatacatagccttgtttggtggtatacatagatttgaaacgttgaagagatccctactggttgacggattatccggggtaaacttttgttttatttaatttaatgattatggctttaatagcaaaacaattactacgcattatgtataacagaatatctgtttaagtacaggttactatggataagtggatggatattacggacatgggtcatgtgattgcatcaagatataacgtcattgtggtgtccctttcacttaaacaaagtatgacattttttcctctacgaagccaaccccctagagacccccacgttcatcgcattttgtgtattggtcacgtctttggtaaccactttgtgcaggtatcatatttatttgtttatttaacgataatacaataatctgaaaaatactgatgattgtataatgttattatttgtaccaggttttcttaaaggacaactgccctttgccgttgacagcgtttttgtgggatagacactgtaccgatgaagcaagactttggccctatcattacattagtagaatgcaaatgtatcttagatgtatgaattttaccactgaacatgtagacttatgcgatgtgtagaaacgtctaaaatgcaataaataaagtgttctgcaaagcataactgtatgtacatatatttataagtatccaggtctgtacaacatgaaaatatgacgcaaaagtaaaactagataagtgttaacaagaaagtatgactagtagtctactgaaggcgcctccgctgtgtatctcgtggtcgtgtgcctcggcggtagactaggccgtgctccatcacactacgagctaggagcaacatgtcctgcaccctagagtatgcttcggagccctctgtgaccatcccgtcatctatgaaggcctgcaaacccccagccaatcgttggcaaataacctgcaattacaatggcttgaacaataaattacccaacgtaatacaatcatatatcaaaatgcgttaataaaaacatatatttttaccagtgcatgtgctggatcagaagaaggagctgcatcagatatgtgtggtgatgggggatcaacatgtactgaagggggaggtgtagggtcagaaggaggacctggaggagaacgaggagcaaacggggcctgtgaccgggcctgtgcatactgtgtcggagtgagaaatggatgtgagatccgatagaaccactctaaatatccagcaacacagtgacttggataatgtaccaagtcaccggtcgatataaggtaatctgtgaagtgggcccatcggtcgtcaacatcgtctgcagatgggactcccgacaccggcaagtctggaatatgctgaatctgtccaaactgcctcactacccgatccggcaagtacctaaccacgtgcggaccccatctgatgaaacctctgaataaactgatcggctcaaaatctctaaagggtcggtgctccgcatatggtgtccagcatatgtcatcaggtctcagcctctctatgcgggcacggtacgtcatcaacggcaaggccttcgcacccttccagcgacaggcacgcggctgcgtctcatcgtatgtatccatagcacccccatccaccacagtgggaaaatactcatatatccaacactgcaactagaaatgattaatctctgaaataattcaaaacaaaccaaaccggcacacacagaaagaaccacaagattacctgtaatagggaaacatatccagctagatgctttccatggtgttttgatgcataactaagattctcatacatatgcaccaaaacaccagctccccatgcaaatcctccgacctgatcgatgtcccgaaaaggctctaagaactggacgcctatatgggttgcactcttgttggcaaacaaagtgcagccaacaagatgcaaaagataagccctggctgccagtagccactgcctagcgccacacaacctgaaatactggtctcgaagccaggacaagcgaacatatgccccgtggcactgtgtcgtctcggcttcagcctcatctacggtgatgttcagcagctcaaccagcaatgtaatggcctctgcaacatctatctggtcatagtcatgggctactcccgtgacagggatgtgcaatagagaggcgacgtcatcgagtgtaacagtcagctcgccgaccgggagatgaaaactcgaagtctcagcatgccatctctcgacaaatgcagagagcaggccccgatctccagtctccatcgagcaccgtatcagcgggctcaggccagtagcagccactaacccctcaatctcaggagctggcttcccaaatttagtaaccttacgcccatgggaagccaacttcagctctgcacgttcctgcaataattacatgaacatatgtttacaatggctaagaagcacagatatcactttgtcctaaagtgcttgtcttatatttacctctcctgaccatactctaacagcgacatggtcggcataagcagtcaacactgaacagtctgctggacctcctggaaaaccatcagcctctatatcatcctgcgccagaggatcctgaaccggaggatcctcaatcagaggatcctgaaccggagcatccataaccggaggatcctgaatcggagcatccataaccggatgatcctgaatcggaggatcctgaaccggaggatcctcacaaagacgaacacccgccttttcacggcgaacggatgctgtcggcctacgccgatcatgaagtccacctcgagtcctagccataatctgtacaacatttgtttatatcttacattatcgattcagtctaaataacatacacactatctgatttggggtttaacaagttggattcacaggcatagaaaccaataaagtccagttatatgaaaacaattccatatcggtttcaacaagtatgattcaaagtctcaggaacatataaagacaaattctaacaaaaccatctcatttggggttcaacaagtttgcatcaaattatatgaaaacaattacatggcaattaccacatacactaatgaacatgtatgcctaacaaaatacaaaatcatcatcctaatattctaaaaaccatgtcatcatcaacatttgcataattataataaatcatattcctaattattttaaaaaagcatgtttttccaaaaatatagactaatacggattacttgatccgtaaaccccatacggattgtccaatccgtatgggttatacggattacatgatccgtataacccatacggattggacaatccgtatggggtttacggattacataatccgtaaaccccatacggattgtccaatccgtatgggttatacggattacatgatccgtataacctatacggattggacaatccgtatggggtttacggattaccgaatccgtatcatacccatgcccccatcaccgtcgcagaccaagaaaaaagcaaggagggaagaagaaacttacctcaacgccctcgtcaccagccgcggaccacgacccagcccaatcccaccgccaaagccaccaccaaagcaccgagaatggacgccgaagtgagggagccgaaacggaagaggaaatgaacagtggctgagagaaggtggagcgggttttttatttcaaaaagctaagggtaaaatgggaaatgcactatacataatggtgtaggagaaattttacatggtgtatgaagcaccactcaaaatgtggcccatgtatggcctccaaagtcatatccatatctgccaggtctttattttcttcacatatcattaattattttttatctttttctacagtaacactattagtaggtaaaaaaaagtatccaaagtgtatactatggattgcatttgagacttattttttgtgtttggcaaaaattagttggcaatttctattttagacaattcatttgcaacatctatgatattaaatttaagaatacatattggtgtaagtatgagaagaacctgagatgtatttttatcaaatgtgaggattatgagagattaatgtttaaggtaatggggatttagtctacacaatatcaaattatatttataaaattattaatatttttatacaatatttgtatttaagaatgatcattagagtcatcgatttatttatatatacgtatatactaaaaatacaaatatcactattttacataattcattcgtaacatctatcaatgatattaaatttaagaattcatattggtataagtacgatacaaataatgtattttcatcaaatgtgataattatgagagactactattcaacatcatctcacaccaatatcatccctaataacgattttatctatacaatatcaaatcatatttgtaaaaattattaatatttttatacaatatttacatttaagaatgatcgttagagtcatcaatttatatatatgtatacactaaaaatacaaatatcactataatattaacatgaaaataaacattatcatacttaatttcactaatattattaaaagctatagtcttttttataataagtattgaaataaataattaatatatttacatttaataaatgatactctatatttatcttaaacaatttaaaattacatatcttaaaataaaaataaaacgttaatttcccgtgcatgaacatgcatactagttaacaaaatagaaatataatgatacatgagtcataaaacaatgcaattatatatgatctaaataggaataaaacatggggcacaactacatgtgtttgtgtagttttcacattaattactaatttttttaaaaataaaaaattaaatgtttctattatgagaccaaaattaaaattttaaaactaggagaacaaatttgtatttaagtctttgttaagacatttgttaaacatacctcccacttttaatcttatacctccctttcacttattttataattgtttttccaaacatatccctttcttcttctggaaaatagcacacccccttttacttcttctaatcgcatttcaacaacttacttctttcttttttgttccatcttcattatatttagaaagaaaatgttggaaactcgatcctgcgtgtgcattcccagcgttttcgctaccgacaaattcatcctcatttcttgtaaaggattccttcgttgataaccaatgagttaacaaggtcatggccaacaacacccatgtcgccaacaatctaatgattttgaaaagtcgaaaagggaactcttgaaatttaagattttttagaatacaaaggattttatggaagtgaatgcaagtactcaatgtgggtcttgattcatgagaggacctcttttgcattgagttccttgatcgaagtttgaattgaggaacattcctttggactattaaagtattaaagtattcttttataatttcatatccagttcatcgcacttgcccaactgcaccactttgtgccttaggatttatgtttgtgatttctctcctttttcttttttcttcttttaatctccatacgaaagagagaaaaaggatggttgagatgaaatgctacgaaatacaaaggggtgtataatttctgaaaatgaagagggatatatttggaaaaataattgcaaaataagtaaaaggcagctatgtaattaaaattgggaggtatatttaacaaaagcctttgttaataacaagtaatttttattttttgatttggatatttctttttttagtcaatctatttgggtctaaaatgtattgttttataacaaagcaagaactgtcccttcttgcacctcaaaattattttctgcatctcttttttggttattctggaatgaccaattcgaaatgtaaaattacattccagaatgattagagattttgacttctagaatgttaatccgaaaggtaacaaaaacattccaaaaagaatgcatgaaacaacttggaggtgcatgaagccacaacccaaagcaagccatgttgtagctttgttgataacaaaatggccttaagtttaaacaacttatggataaagacctttttacccctccttccaccttcttatcacccccacctaacccatcacaactgcaccaacactgtgtgctaccaccttcgtccaaatccgatcgcacatcaccacagtcgcgccgaccacattcgtgtcacgccaccacctgaccttgcgacaccctcatcaaccaaatctgaacgcaacaccaccaccaacatcgcacgcctctcccaacaccatatatgtgtgcgctaattctcattggcccagccaccatcacttgtcttgaccaccatatccaaataccacagcaccgcgacaactcctccttcctttggttcttgtgcccccatcaactctagattgcacctaagcatgtttcagttggaagagaatctatacaatgaaaatgtgtttccattcaatcatattaccattgtatattttttttcacccccattgacaaatacacaacaaaatcacgttccgttgtgttttgtttgcatcccatcacataatggaagcacaattccttgtatacttgtacaatcaaaattagccccttggtaattggtaatgacagtgggccaaatagcaacccatgtataagttacacgactaccagactgcaagcccatctctatttgctatcttcgaatgtcttctataaggttgaccaaaaaaataatgttttctataagtacacgtagattcagagaaattataaaatgatatttggaagagtgagatatttatcttccaaagaatatacatacaataagcagtttctttttaatatgtaagattttttttaatagtgaatatgtaagaaatattagtttgtataacacaatcttgctgatatcaacctactattttcagtattttgggttagccaatcatacacaatttctagttgttttgtgtacgaaagccgatttgaattaaaatatgttgtataacagcaaactgtcttatcgtataccctatggcaaaagatgccaaacatgacaagtagatccacgttttatgacgctgatcgaaatatattttcatttgtttacttgccccttcaaccagctttctaaaatggaaaattttaaaaactaaaaacaaatgctaaaaacatactcttttgaacaatatctttataatttattaaatttattgaaaataaaaaattatattagtcccactaattatttaataagtttatttcatagttgtaatttctaataaattttaaatcaataatatagaatgtgttacaaaaactgtgttattaggattaaaaagaagaagtatgttattagtacttttctttaaggcttaataggttataggtatgtctgtttcatatataaaaaaaaaggatataattaatgttaaaaaaaagttcatttatttataaagaaatcagtactgttgccagacgaatgagaaaacaattcaatggtggacatagaataacctaataatttttttaagtagatcctaagtatatctatataacactaatgctatttcttacaataatttatttgacaagaaagataagtatatttttaataaaaattaataaaagaagagaaaaaagacctatgacgtaaaaatgtttaaaaattgcattttttttaatgtaaaccactacagcactgtcattcacgtagaaaatagaaatacacacccacaatcctcttgtatcttccttcaccgtccatttttttttctttatattacttattaaatgaaaaatgaaagcccctctttcttccttcaagtaccttagattttgtgagccatacaaagaaatattcttggcaaaattattatttccgtgaccaataagcatcaatcaagtttctctagacacaattaattattcgtctacccaatggatacgatttaagaggcttaggaattaaggttttaggtttgataagtattgacttattgttcctatggcccatatatatcttataaataaccaattcaagataccacatatatggtaatcaagttgtggatcgaatatccaatggaatatgttcctaacccatttctttctttgcatcacgatctcctacttctatttttaccagtcaatcaacttaatagaatatttattgggctaatttgagctacattttgtctaaatatagaaatatgacaatcataattcaataaattatattcttggtcttcttgagacgatgaaatgaaataagtaaaatcagtgaaaattaaaataaaaaagtaaaagattgtgccaagttgatcttgatttttcacatacaagttgcgctcaaacaactttcatccttatgtctcaccaattttatagcatttggggacggggtaattaactcacagtatattgcccccatcaacatgtgccttgtaaaatataattggaaactgatgaatcaaatgtacgatttcaattgttgaaaacagagacaagttctcttacgaaagatagagaaagaaacaatcccatggaattagtatagtggaataaatcaggatcttacatatgataagttgtaggtttgaactttcactcatctctttggattgaaataattagataaatgtaagttcttatgtaaatactatgagttcaaactagggagactcttcctgcattgaaatggaatatcacccctttttctaaaatttcctaatgaagaaacaaatagagaaagaaacataagaacatacaagacaaagattaacaagccatagccccaccacatgttacaaaaagtaatcaccactatcacataagaaggatgacacacatgggggtgcgaaaaggatattatttgtgtggcttaaaatgttctaggagtagtgggacttataagaatggggccaatcgtattacaataaccactaaccagttgttgtctcctggtaaaaattttagtgtcccaacaaaaggataaacagtaattattaacatcaatatcaacagatgtacctttaacccaagttagttagaattgataatagatgaacttagtgataaatacaaaaaaattgaaaaaaaaaagaaaaaaaaggaaaaataagacaaaagaaaagaaaataagattaaaaacaaaaaagaaaagtgaaagaagaaggaaaaaaatgaagaggaaaagaactagcaaataactgtatgaaacataaagataataacgggtctaatcttccaccaaacttataatttttctctatttcgtcataagacacaccttccaccaatctatatctcactccattaagttttgtataattgtttttctccaggtaagtttcggtctatctctacctccatttatgtcgagttcttggtaacaaactcttgtccttacgagagcatccagggctgtctcattacaggcccaaactaccttcatctatacttcctcatcttttcactcacgatactactgttatcttttatcaaatatcttcatttcttatctgactatcttcgtataactacacatccactttaacatcttcatttctgctacccctattttatgtttatgtattcaccaacattcaggtccatatataacattgcaagttttacagctgttctatagaattttccttctatataaaacttattattgtctcaatatgaatgtaaaaataaaacgagagcagattgtcacgtgttgggtaagtaaaggtgtgggcatgtggctttctactgcactcagctaacttataccaaagagaagtagggaaaggtcccagtttgattcctcttgctatcaaacaaactaataattaacatttatcaataaaagaaaacttatacttaacatttatcaataaaaaaaacttatactgaaattgtggatagaaaaaatcacacagtggagttataatatcttctctgtcaattatgtaagcccagacttttgtaaggaattgtcatattcacattcttggcttttttaatcaaagtttcacatatttaggttcaatcagagaaaaaataatgtgcatttcccctgtttgtgtatgtggctgttaagtgtggtttgagcttgctatggttgagggagttagctgttacttggttaattatgttatatcctttataacatgcagaatatccaaaagttagttagcagttagaatttgaatgtaaagctcttatataaggcttgttcttcttccatgctaaggctaatgaaatgctaatgattcccactctttcttctcaattttctattgctttataaacactttaagttctgtgtactcaagtttgatcatagaaaacttgcagtatctatttatcataacagttgcaatacttaaaataggtgttacatgtaagcaaactatatgcttatttttgttttaattacaaattacaaaagatatttaagaatacgtgtgaaaaaaagttacagttccggcaaaacggccagggggagattcaattctattgtcaaacaataggcaaaaggatgcgtcattttgatagttaaggttcttggacaaaattgtcttagttatcatcttggggctcatcttatatttcaaccaaggttgctatatgagcattattattgataaataaaagggtgtttcattcagtaaatacaacttaattgagaatattttgggatttatcaaagaaccaaatgttttatttacaatgattataaaaaaaataaaaatgaaggaatattcccgtatcttaactcttgtgcatgcgactgaatttatgagaagtaaaaatcaatgacttggtaatatggaagtaatgattgctctttaaattataaataaatgaagcttaaaatatgtttatgttctttaacaaattagtgaattttattttagatttctaatattttttttattgagttcttgataaaataataatttattttttatctttaatatttttttaatccctaataaattagattattttgttttgaattcctaataaattttgttcatttgttattaatcccttttcaaagggactaatagttgagattagctggatgttcttaacagcttctaaggagattcaatgacgcatagttacgtttgcgaaagaggcttcttaaatcaaattattcttgttcttgactatattttggaagtagtgaaaaatactaaaaggaatataaatgcacgttttaaaaaaaagtgaagaaagataatatgttgtataaatcattatagttttatatctcccaaaaggatacaaccaatgatattagatatttagattggatcactaattttgaagttgtagtatagatgaattaattagaagatgctccattgaatcaaagaagctcgcccaaaatatttcttccaacttacacaacaacataagtatattatcttccatgactcttaattatttgacatttagtgttgtcaaaattagatccttcaaaaggtgattaagctcaacaagttgcttccgaataggtttgggttatgagtaaaaaacaattctaattcaattgaaagcaactcctagaaactagtaaaagaaacaattaataaatgataattttagtttctaaatgcgtaagctagtaaacatgaattttgatttaattcttgaatacgtaaaattataacaattacgtaaaaaacataaactcacctagaatattattgcacatgttcaaactgcaaacaagttcacccttctcctcatctgtagttagtaaactagctcctaagtgtcacaaaatctcctcgaaagggtttctatttaagcaaagaaagtggcgtgagaagaattcaatcatccaatcacagaagagtatagttcatatcttgtgtcaagtgtcaacccatattctcatctaaaccttattgttgtcatgctataaaatatatcaaagtaataattgtgtcaagagtgacccaatagcatatgctcccagttcctctttgattcctcgaagtgccgccaatgtaaaagagaatatccattgctgccttgctggagtcccttgcatgtgtcttggattcctctctctcttaattctctttagatataagattagaaatatttttttattgaaaagaaaaataacttatatttttaataaaaaaaactctaaaaaatacttttaacttatatcgaaagaagccctaggctctcttccttccgtacacaacgcacaacaacgtagcatataattaatctaccattccattcaaggctgtaactttataaattattattctccctcacgtatttgcaattatcatgaacaactctacgtctctctctataaatccttctgtctctcctcctttttgttcacctgccacattcacaacaaccccctcttctttatcaagtttccctcagaactctcttagatttagctgctcccaatcatttggaccaaaacccattaaccccttttgcagaaaagcacgattttgctctctacaagggtcaacgagtgtgaaaagcagaaaaagtttggtgctttgtgctatcaacatgactatagcaacggatagtttgttgcaggtgatggaggaggaagagggtcctcctgattttgctttgcttgatcctgaggacaattctaggcctcgtagaattgctctcttcgttgagccctctccttttgcgtgagttggtttcttaatctgtgattctaaaatgtgcactgtttgtggtttccaattctaattgaatgtataatgttttagagtattgaaaccccttttgcctatttagtggtttttagtctttttttattttttcaatgttgaaacatgggagctgggttgggacagcattgaattttagtttctgcaggagttgacttgttcttgttattctgattcaatgttgactctggtttttgatgaattgactgttgaggttttatagatcatatggatttgatcagttgaatttggttttcatgtctcttttaatgacaaaaaaaaaataagaaagcttttttgttttataatttaattaagttagctttgtcttcaactgtttaggaataaaatttctattagcttaataataattctgtagtgtcaccatctgaaacgtgcatctcagctattttctgctgtttttcaccgaatcaggcttgtgaataaaaaacgttgtgtctagtagacactcggagagagaaagagatagaagatagagagtagaagcgggtaaatgtgactagtgatatgatgtaataaaaagagagatgaagagaaatgaagggtgtgaatgatgtgtttacattatgcaggtgtccaaaaatcacaactcttttgatttggatgtaaaattgaatggcaattacagcttatgaatgtgtgagtgaccaagcattaattttaggaaaagttggtgggaaattaaccttacaatcccaatgagattattgcattacacttggtactattgtgtgtgatcctttatacgatttgtggtatggtgtctgctatgaaagaaaaatcggttcttcaattcaaacagaatgttcattccacctttatcttttttttttttatctattttgcagatatgtctcaggatacaaaaatcgtttccagaattttataaaataccttcgtgaaatgggagatgaggtaacattttctacttcttttgtttctagatacacacatgtcctgtatttcttttcttaacattgtaaacaaatgcttagctttatttgtgcatgttataggtaatggttgtcacaacacatgaaggagtacccaaggaattttatggagccaaattaattggatcccgaaggttgctgactttgacttcttttgttttgttaggacatttttgcttttaagccataaggaacttaattttttattgtttaatcacagtcaacgcttagtcgcttacttttttaaattttcatcttggcttatttcctatgccactacttagaaaagtacttttatggtgcggaatattcttgttaactttttttttttttttttgtcaaagctatttttttccagcttctcagaaaagtactaaaactgattttaggtattatgcattttcttttttaaaacaacttattaattatcataggaaaattcaaatattccatcagttacaaagcacaatgaaatgggctagtaagtcctcatgacattcatattgtacttgccaacatgttctttaaacttatgattgctagcacaatcattgcttcgtactaatgatcttcatttaaacaaaaacattgaaaaatgcagcttcccttgtccctggtatcaaaaggtacctctctccttggcacttagtccaagaataatttctgcggttgctgagtttaagcctgacataatacatgcatcatcaccaggcataatggttagtctacgattcctgcatctcctcatttattaactgcaggattctaaagaacaacgtagttggaaaaacttatttatctcaaaatctgaggctgacttaatttcaggtttttggtgcccttatcattgcaaagcttctgagtgttcctattgtcatgtcctatcacacccacgtaccagtgtaagttgcatatttagaaccagtttggataatgcttaattaatacttataggagaagaaagtaaggggtacaatgaatcaaacttctctttcaagttaaaattaacttatgcgcgtcaagttttggaaaagttagatgacagaactactgcgaaagttgaaccatataaagttataaactgattttaatttatggaaaatattgattcattttatctcttcattttcttctcttacaaggacttgttgagaggtttatccaaaatggacttttctcacatttcaattttctgaatgtatttgatatttgcaaagctatgatgtttggacttcagattatatctactagttcttgtggttgatcttaattgtttttcagatacattccaaggtacacctttagctggctggtgcaacccatgtggtgggtcataagtatgtatatgctctctttcttcctttgttcaacttggaatcatattttgtgaaataacatgaatatgctgttttatgtagaatttctgcatagagcagctgatcttacactggtgccatcagctgccattgcaaaagatcttgaagaagctagagtaacagcaggtgaactcaaacaccccttatgaagtgatttctaggctctctgctcagttgataatagcagctgaacattagcatttgtttatactactataacagtgttttactgcaatgttgtgtgtgttacatgatcacatctcatctctatttataatggagaaatcagaattggtattgattacatatcaatcaattacttattattaggtaattacatatcaatcagaatcataagtttctatgtaataataaatacaagataatgtaaagataaatgtaatctaacaactgcgttgtcaatgcagcaattttttctaactcaattctcctgttgatgtccagcgaacaagatttgtctttggaacaagggtgttgattctgaaagtttccatccacaattcaagtcccatgaaatgcgattaaggctgaggtgcagaccattttccattttcatgtgcccaaggtttgatatttaattgggtttcaatttattcttaatcttgtgtcatacagcaatggtgaacctgagaagcccttgataattcatgttggacggcttggagttgagaagagtttagattttctcaaaaggtaaagaacatactgaaaatttcaaaacacaaacttatgattttgcggtccatcaactggaacattgctgaaaactttttgttggttattaatgtactgaagcttaagatggttataactttttcaagacatgttttccaaatgttctgtttgaaatgcccctatctttctgttacttctgttctttatagtccatgccagagcatatcatgaatatatctagcatatatctttaatatctgtatcctgccttaacatttgaaacacacgatttggcagtctcatggataggcttcctgaagcacgaattgcctttatcggagatggaccctacaggtgacttattctaatgtgtctttgcttcttttatctatgctaattaaacttttcaataagtacctgcaggagaagaaactaagaggtaaagtgaatcaaactttttccataagttaaaatcaacttatgcatctcaattttggaaaagttagatgagagagtttctagaaaagttcaagtatttaagttgattttaacatacaagagatgtttgatttattttatcttcttattttcttctcctataagtacttctttaaaagtctatctgaattggcgttaagacttttaactaatggcattctctaagtggatgtttgtgtactattaactaataaaatttgtaaaaagggtttctcttgccatgaagtttgaccattttcttgtgtcatggcctcatctccattgttctggccaatatagttggtgaagcccatcaatatcccccatacatgatagttttactccaatgatcaaacattattattctctatctttggcatttttattaacatgggttcctaactgaacagagaggaactagagaaaatgtttgaaggcatgccagcagtgttcaccggaatgttaggaggggaagaactatctcaagcatatgcaagtggagatgtctttgtgatgccttcagagtcagagacacttggccttgttgttttggaggccatgtcatcagggattcctgtggtaggagcgcgtgctggtggcgttccagacataattccagaagaccaagatggcaaaattggctacctctatacaccaggtgatcttgaagactgcttgagcaaactaaagcctcttttggatgacaaagagttgagagaaaccatgggagaagctgcacgtttggagatggagaagtatgattggagagcagccactcgaaagattcgcaacgaaaactacaatgctgccatttggttctggagcaagaagagggctcaactgttgagaccctttcaatggttggctcaacgtattttcccatctccagatccagaagccaactcataagcgtggtgattgatgcaaagcaaattcttcttttaagctagctttggatggttctttaaatggttgattgctttgggtttgaggaagccttgtatgggacagaagtatggttggttgtttaatgtattcattgatagatgtatatataatgggacaaaagttatggaatgtgccattgtagagtggattaactagagttgaatgtcaattcatattgaggtatcggataatgcaaggtacattgtgcaatcagtaaggggagaatccattcatgttttactagtggaaatctagtgattaaatgcataaaaattggcccttcagaggatccgagatacagattaaaaattgataagacaattaatgttgatacatataatactaaattttttaatgtatatttaatacacatatctaaatctttaattatttagtttatctaatttctttatcttttcttatttcagattcttattttattaattagagatattattttcattttatcaattaggataattgttagttatgatcctatcaaataagattctcttttattttaattttatcaattaatgagttatatataattaattttatttgaatattgaattattttgaatttatatataattaattttaattttaatgagaaataattcaacattcaaataaaattaattatatataactcattaattgatagaattaaaataaaagagaatcctatatgataagatcataactaaccattatcctaattgataaaatgaacataatatccctaattaataaaataagaatctaaaataagaaaagataaagaaattagataaactaaacaattaaagatttagatatgtgtattaaatatacattaaaaaatttagtattatatgtatcaacattaattgttttataacataattgacttattagcttagttggttggagcgccgtgttaaaaatatgaaggtcacaggtttgagacctacatgtgccattattttaaattgttttaaaaaaatattttaacttaaaaaaaaaaacctacggattgggcaatccgtatgggccatacggattggacaatccgtattacttaacaaaaaaacttacagattgccgattcttacggattcgacaatccgtaatccgtatgaagataacgaaatccgtaagtttcaaatcgcaaagggcattttcgtccgtgcactgttcacatatagtgtaagaaatttatatagtgtatttagtaacactccattgtaaatctgtgtccaagtgtagaattttcattttgaactgtttctgggttttgttttgtctagaaagaagcactttgtcccgtgctattcacatccactttttttctttacaccaccactagtcttggtttctttatatttccaaaatactccttttctctcacactttcacaccccatacttttgtagattttacagaaacttgtttatgtagtgaaattacattatgaaaactagtttctataatgcaaaacaaaaaaaattacattatgtatatagtttcggaataggtatatgttattccggaaagacaactagaagagaaaaagtggttctaagaggtgtacttctttaaagaaaaaaagggtataatgggttattggaatataacaagggggatggaatgtttttagcaaaactgaaggtgtaaatagtaggctccttatttctgaacacttggaaacaaaaacacgttgaattgttagtgattcttgtgatagagattaaagaattaaatatggtctccattacggaacaaaatgaggtagagaagggctaaccatgaattaaataagattcagatacttctttttttttttttttttaatgaaatcgtgcacctcgcgttcattgtttgatggcctccaaaaaaatttctccacgttctcccgtgctctctatcatgcatacactaccaaatcttgagctatgttggacaagatggatagagagtggtcggaaacttgagctacatggtggtgttgggcctcggggaaacacaggaagagaggcgtatatgaggttatttttctttctttacttcgttaatcaatgaagagaaagaagctagatcatgtttaaggtaatgcgaaaacaactgattatattaattcttgtgataaaataaatttaactaaaatatacttattttgtaaataattaattatattatatagttataattatatatttattactgtatttattttaaaagtattgtaaaaaataattaatattttaaaataacaaataatttgagataaaaaaaatacttcgaaaataataaataaagttagatagaaagaatatatgggccgtaaatgcaacctaacattttttttgctgagtttaatgcaacctaatttggagcccaaatggacaaacaaaaattaaccattcttaagtaaattcatatttatataaaaaaaaaatcaagattagtgtcattagtgatcaataaaaatatctataaaagtaacaaagcaaatcaaagggaaaaacgtggtccacgaatgggagttgctattcagtctatcaaaaatactattctcactatccaggtgggttttttttttttttttttactattttttgaaaatttccttctaggcaaacatgattccgttgtagagttttacaacataatcgtgttttcatttaatatatttggggtaaacaatacaacaaaaatacgattttgttgtaaagttatacattcaactctacaatagaatcatagtttaattgcttatgtttttttcaccccaaaaatgtacaacaaaaacacaattcagttgtagatttgtataacgaaattgtgtttttgttggtttgtttgatggacataacaattatgggtataaaatagaatctgaacttgaattacaatacgatattcatgactaacaaacattataatcagcattaaaggagtaaaatcattagctattgagttttaccatgtctaaaatcagtacatataaccataattaatacaataattaactaaaaagaatctttagtaatgtctattacatattaaaatcctattgttgaatgaaatgatattgatttaaattcttgtatgcgttgcaagcatggtctttatcacgaacgagcttcacatgtgcaataaaaaaagctatattatcctttaaaaaaacctaatcttgaattgagttagtgaacaaatcaatacatgtcctcagctagacactactaaaaaaaagtttttaacatcgtcaattaaacattggttttatgaaaacttatgttaacaaaattgcggtgacatttttgtaaataaaatgacatccttaataacgattttagaaaaatcgatgttaacaaaacaagtttaacattaatttttttttaaaatcaatgttatctaaacactcacattatcaatttttaaaaaatcgatcttaaaattcctatttcaacatcaaattttttaaaaccaatactgtaaatgcatcgattttgtcaaagtttatacaaaagtccctcacaagctggcttctctgtacctctctctctcaaaaccctaagcttctctgtacctctctctctctctcagcattgtgcttgtgtcaaccacatccttcgctagctcaaatcctcccggcccaacatcaacaacctcaccatatgtccgcgaatagagcactattgtccgatgtgccagcaggacacgtggcagtgggtgtgggcaacaacctcactagattcattgtgcgcacgatgtacctgaaccacgctgtcttcaaaaagatcctcctccaagcagaggaagagtacgacttcaccaaccacagacccttagcaatcccctgcgacaaaacgctcttttgagacgttctccggttcatttcccgctccaacactgccaaatcaaaccggttcttaaatctcaaactcgagcgattgcaatgaccgtaagaattccaaatactatgtcattgtcgttcaggttctctctctctcttgttaacttaactccttcgtggattgctcttacggattcgtttttttttttgtagtacaccgcccgcttcaacgttgtggctatcaagaattttcaatactctttcaacaacggaagtatcgagaaaaagaaattcaatagtaaggtctcatttggttttaacatttgttttctataaaacttccatactactcaacaatgaacaatcaatttcattgtccaaagtctttaaattatggaaatcgcttccaaaagaaatgttctaaaaaaacaaaaaagataactaggagatgttttctcatgtcttctattttcatcttgttcaattgcattttgttttgagccttataccactctccacctgctagcaaccttatttagttgcattttgaaaggtaaaactagtttttaaaattagaaaccaaacgcatcctaagctattttgttttgcactcttttttttttgtgtgcagctcccgagtggttgtttttaaattaatgtgtattgagtttttcttttttgaggatttgtataattgcgttgaatgaatttcccattgaacattgagaattttgtgtgtttgtggatgaatgttgattagtgactaaactgaatgtagtggacgtgtcatcgacctaagttgattatagttgtaaaatgataaatgtgattgaaataatgtttgtgaattggatggtctcaatttgttgtaaggactgtgttgcagaaattgtgagatgtgtgatgggttgttggcgtgattagaagacacttaaggttaaaattcttgtctttggttgagaatgtttgattggctttcacttagtggtggtagtcatccatgagtctttgcttgtgcatgatagttatcaagttcaatgcatgaaactaaaagtttcaattttgggcggccagtcaattgtaaatactcactagcaatagtcaagagatgaagtaaatattcacgttgattgaactagtttttaatgtactgcatcatctcaattttctatattgaacttactgcaaaccatagctgatgaaactgcatgggagttggaccaaaaacacttgaccattttatggtttttgttacatgaaaattcttggtagatatatgaagaaaacttttagacgaagagaaagaataagtagacacctacatgctatttggttggataggaatggaaagaagggtagaaatttcaaaaaaaaaaaaaaaatcttgtatggttctagagtttggaggggagaataaagggtaaaaattcagtccccccaatagttgaccctttaccatgtgaaagtgtttgttggatcattgtttcaataatagaagtatatttaacttttaattttacatttatgctgtgaatcattaattttggggacactacacaaacttcttgatgcataattcctaatttgtgttttgttttgatattgtgattccattataaatgcaggatctccaccgatctagctaataatatgtctaatcagcaacatgttggtgcagcttcagaagtaacacttataagcaggggcgattctaggcccattcaaggtgttcaaccgcacaggaccccaaaaataagggacctcaaatattaattactgcaacatatgtttaatattgaaaattagaggagatgataatgcttatttttaataaccaaggggtccaaggttcaattcccaccaacaataatttttactatttttacatttcctgagacacacccacttgatacttcaatgcttcatttggggaatcacagtagagaagttgcctattttcatcaatcattcccaatttttttttctctcctcctttcttaattcacttttactctcttaaaaaaaaaccttcaaatttcccaattgaggactctgttttctaaaaaagggaaatattaaacagggccccgaaaaagtttgccccgccgctgcttataagtaatgttgatcataataatcttgttcggcttcttggttgttgcagtaaagaccaaggaaggatccttgtttatgaatacatagcaaacacaaacttagacaaattcttatatggtaactaaattgtaatttatgtaagttttactttcttattccttttcttttctcctctaatgttttgagcctgtaaacttgggaagcaaaaaaaagaaaaggttccctcaactggaaacaacactatttattagtgaaattttgcctagtgctggtaatggcaagttccatttctcaatatataaatgcgcaagtaaagaggtgcctgttggatagaggggaagttgcaagaagaatcaaagcaagaatgaagaagaagcttgatgaatagcttaaagatatttttgctttatcatgtccaatcaagtatgaagacatgtgtaatgtgtttaagtttgattcaagtacattgctttgtgatccttgcattgctatttgcatgtctcattgaacttgcacacataggttctattaaaacttgaaagctactaaatgatttcaaaggaaaacacattctcatggctctgtttttggaaaatgaaaacttattgtttaatcgattacatagtgttttaatcaatgaaatgcttttgttctatatctggaaaagcaatgaagaacactttaatcgattacaagattgagttaatcgattacatagtgtattttggaaaaccatacacttctgctttaatcaattacaatttatcgtaaacgattgcataggctttttagaaaactctatttttctgctttaattgattacattgcgaaataatcgattattctattcctaatctttttccatattgctgaggaacaatttaatttattatttagttattttaatcaattacatatggcaaataatcgattacactaacggattaatcgattattgttagttaaaatagttttttaaaagcctttgtaagtcagttctttatatatagaacttgtgcaaattattcaatatacccgagtgatttaccataaagaaacaaagctttctaagtgttcaagatattgattttcttgtgagtaacacatcttgtgaagatcaagatttctgagttttttgagaaaatgtactaaagacaagaagtctttcaagatattgattatgagcaatagaattcatactacctggattgtgtggtaatctcatttcgttttcattcattcatacatgaagcatcacaggtagtgtttatcttgaatccttctttttagattttctaagagttttgttttgttgtgttgtaatatttcaaattgattccttgtaaagcattctagagaagggttctctaggtttgaagatttgagtaggtttctcaagatctttttgacttgtattctaatagtgttttagaatttaggatctttgtctagtgttagtagagattgtcacttgctgtgcttgtacaagaataatttgatatagtgaaaactctaacatagtgttggttggaagacactggatgtagcctccatgtttgtgaggtgaaccagtataaattgttgtgtgattgtttctttatctgtatatctttcataactattgtttggaaatcaatatacaatcaataaaaaacatttcagtcattacatgcatttcaaggtgatattagattgaaagaattttttttttttatcaagggtgattgagtgataggatccaagttttaaattccgcaaattgttttcaagaaaagtttttaaaggtagttttaaccaattcacccccctcttggttatttgaagtgtgttcatagtattttcaatgccaatggtgatgcctcttaggacagagagaaactcaacgaataaagataaggctaaacttgagagaagctcaagtgctaaggaatggatagtcagtgaaattacctcagaatcctatagaatacaatagaaaacaagatgtatcaactacttccacagccactaaaaatggatcaaattccaatcagattctagaacaaatagtttctgccaaaactcaattagatacatcaaccggccctcaaacttttagtaaagatgtctctgctagttctatctcacgcaacgctagagaagtagaatcaagtaatcattctacaagtgataagaatcttgagcccaaaccattgtagtttctattcaaagaaagtgataagaaataaggtgaagccatcttcactcttcaacatttcattctttttccttccctctctctacattatatatatgtatgtttacacacacattactaccttactagcctgtgataatgtcctttatttcatatgtcagataatcatgagatgattacaagggagggagaagaaaacaaattgagaagcacaaaaaagttgtctattgctttttatgttattgtgaatccaatgaaacaagaagaaaaggtagttcccttgagagatgtaggacgtaacaaagccacttcccagggttcggtaagcttaagtgagaatgtggggaaaggcctagtgaaaggaaaggtcaaagaatttgctcaaattttcaaccaagaagatgtaaataaacccaaacttgactccaaatctcaaccttagggttctacatacaataagagatatgatttaaggacaaagaatgaagtaagtattgtcacaactaaagaagatgactacaagagaaaattcattttgttaaaaggacatgcatagtttgaatgtgcgttagtgataaatctcatgtacaattctagtttcacaatagtaaggtgtttatgatttctttcaattctcctacatggaagttggtccaggacaacccaagaaggataactccgccacagagaccacaaacatccctgctaataatttgtctcataaagatgatatatcagaactaagtacttcttagttatccaaatcccaatattccttcagttgagaatttactttggaagtggtcgaattatgaatatgctattctttattcgtagcatggtgacaagaatatggcacacttaccatgattatgtatgtggcctacatcgtaaaatgggaaaatataattacatggcaagcaatatgcaacagatttcatttaaaattcttatgtggttatttattatttccttaattctttttctcttaattatctgttaaatcaatcctcgagaaagtttctttattgtatggtctacatccaagatgtggatggatttcatttggatacattgcaagggaaactatttatacaatcaatgaataattatggggccaattatttgaaaaagctattagaatcttttcgatgcaagtgaaaaaacttagttattatacaaatgtggcacttgcttatttattgataacgttaaaaaaattaatagttaccaatctttgatcaacttttaaactatgcatatataatttggctaaacattgatgtttaaattatgtgatggagctactagattttgttggtagaaattcctaatatatcattgaccgttattggagataaagacgagtccttccctgggagtttcatggtattccattactaagttaaataagcctttttttgtaagcattaattgttttcctttttgtgccttatgttgataagctcctgtatcgggttttgtagatgcaagtattagccattatgagggtgaggttttacaaacccaagaaaatcaagaaatccaagtaatttgttacttacctagatttgtttgtttcaaggttatagaagaacaacaatattgagtatatatctctgtgtacaatgtggacgattgacaacaagataaaacattggtctaaagggatggaaggaaacatacattccttgctatcgacattacaatatgtaagaaaaaaataaaattgttctttactccttgctattcttatcccacatgattgaaaatttgatttcttcttcttgtttttgaaataagataaagcattttattttggcttgaaatcataactagaggttagtgcttttaaagtccattggtgggactagaaagtctaataatccccctatttggatggtatactctaagaagggacgtatgatgtaaaaatttgatcatgtgacaattatttaggatgcctatatatttaattgtggagaatggttatgtagtagttatgtatttaattttgtaggatagttatttacttaattagcacttaattagtctaattatggaggatagttataaatattttaactataaaagtgatattgtaattaaaataatctcttcaaatatttgaatttaaaattaatatattttttataaactggttttggttggttcattgtaaaaacagataaaatattaatttttttgaaaaaaacaacatcgattttaggccaaccgatgtcataagcacattcaaaatcagttttttcaaaaccgatatagaaagtgttttagaatacgtaattaaacatcggttttttcataattgacgtagaaagcgcttcagaatgcaccttacaacatcggttttgaccaaaattgatgttgtttttacattttttttgtatatttcttactatatgatatcaattttgggaagaaccgatattgtatagtggatttcaacatcagttttcatacccaatgttaaaattgatacttttaacgatagtagtttcagcatcgattcataattatatcgatgtttaaatccgtaaaaattgatgttaaaagtctattttctagtagtgagagcttgatggaatatggatgtgaccgtaatatatctctaacaacatcttgagtgtccaccattttgaaccaataaacatattcactgtgtcctatcaacttcatcaaatgctatatttttgttcttggacccctttggtcgtgaaaatattttgtctttcattgcatttggttttgatggtggtgaaatttctatgatcttgatctatgattgttaacaaaatttgattaagcttcaccatatttttggtcatttggtaaagcatagtttttggttatttgacccaacaatgtttcattgagtttatgattatgaaatccacaaactacataatgtttcctccttaggcttctatccagcggttgcaagtttaattatgatttaaaaataggttgtttatgtccatccgtggatggatttgtcatagcaatccaagaaacaaccttactaggaaatctatcaaaacatgtaggcaacatgttgtatctacatattacataaataaaagcaaaaaaaaaaaaatcttttatacataatgaaaactttgtgcattttatttttgttgtgtgtcaaagctcaaatacacaacaaaaataagttttcattgaattggcgacgttgacgactaaccacccaaacgattaatttttttactatgtttttgtaaatatacatatttagtattttattttgtatgtatgatttatattttggattgtataaaaatttttggacttattgtgtcattgtcattactagtgcatttttttgggtctaaatcacaattattttccacggagataatcatgttcgagttatatatataggacaactatggacaaaaaagctctccctccaagtatttaacacaattgcatatccaagagtcaaattcgagacctctaggtaagctgaaacaaccacacattaattgattcacgtgcttgtggtttactagtacattgttacaataaaagtgcatgataaaattaataacaaatcaacacaacataattagtattattcacgtgttagtgaaacattaaaagatccactcaataaaaataattttaatttagaaaaaaatcacaaatacataaaagaaacaaatttatgttgtatatgaatgccaaatgcacaatggattttttttttgttatgtattttgatcaacaaaatcaagtttccgttatgtttagaggtgtaaacacaatacaaaataaaagcacaatttagttgataaaaatacacaagataaattgtttctattgaatatttgtttgcattcctcttaattatactacgaaaatgtgtttttgtcatgtattttattagcgggagctcgttttggctagaagtattatccaaaatagcaaaaaccaaacgaagtatggggtgggaaaagagtaaacctaggaatagtaaagtacattaaaaactgcattgacctctttatctttggaacgtatgcccaaactggtaagtgggcttggaccttcctattttatgtcctctttggattgccttacatagagagaagaggaagcaaataaacattttaaaaaataaatgatatatatatatatatatatatatcatatgagaagaatgtattttacatgaaagtgagataattaaatttgaattgtataactaactatgaacgagattataatttaatgttatgtgattacttaaaaaatcatatgattttttaacaatctttcatgacacataaatggtcacatcacattaaatcttgatatttacttatataatctacgtttaattttctcactctcataaaagatatttctacttacaagatgttaatgttatatgtgtttaattcatcatttgcagaaattgtggaattgtaaaactcaagaaggcatagtagtatcgaaaattttgataagtaacaaaaatgaagttattgaatattcctaagaataaaggtagactgttctgggtgttgtacatgtcaggatggtctgctgctttggtcattggcctagtagtagctttctgtagtgagttgttcaggtaggcttagggcgtatatattttcatttagtcaacatgttactgagttcacaattgtttggtcattgctctcactgcatagtacctaactgtaaaatatgttcctgaggccctgacattcgtctttccagtttgtcaattattatgtctgctactaattcttggaggttgcacacttgttgcaccataaagcattaaccaagtggctggattatgctgctcaattcgagaaattattaggtaatttcagatacccatcacctgttcatggtctctatcaatcttttatgtaatgcatattcagtttttgtaattaataacatttgattatgtatcttataaaaattagtagtgatcgatcaataattcagaatcatctaataatttctcattaaattctaggcggatcttttgtcgagcaaagttgacagataaagacaacaacaaacccaagtggcaattgtcagaactagcagctagagctggttaatgatgatatagaggatcaaatcttcactcaacaatgtcattcattagtgaatgatagaggcgcgcggcaggtcatcttttctatcctccttttttataagccattcaattttgccctcaaaagggacctcaattccacctcaaaatctctgttatgcttcacatgcaaatataattttctggttcttatcagcatctatattgctgtcttggaagcgacaactgatatgcatcctggttggagtgcaatatagactattcgcaagaggggtactatcagattacacaactcattgcgctgagggtcccatgagtttcttttcttttttaatttttctttcttcttgccttaaatctttgtccagtacttaggatgtttgtgaatagaacgaattgtttaaatttatttgttaaaataaatatttattataataaaataagtattttttttctctttttaatatgtttgtttaaattattttttttatttattttaagaaagaaatcttatttatttcttaaaaaaatacttacatacaaaatatttatttttaagttatttttttaagtttaaataaatttattgaatatcattaactatttatttatttctttatgctttacggactatgtcttgcttatttgggtacttactggttttgagcctcatattaagaaaaataaagcttaatataatacttgaattatggagttgatcgaactttaagctatttcacctaattaattaatttttttgggttggacttccttcacctgcttgaattaaggagtaacaattacggtgctttcgttaagtctttggttacataaaagactatttatagactagattaaggtgcaattgatgtactaaatgctaataaataattcaagtcgtcaatataagaaaaaatggttaccattgagatagttttaattatctaaattttttggatgtctgccctcaaaagaggagatagtgttaaaatctcatatataatacttaaaccataaggttttctcacccaataaattagtttgagttagactatcctcttttacttatatataaacagtgcttattgtgcctaagctttcctttttattttaaaaaatgtgttttgctaacatatttgtgcgctttatcggtatcatgctatgaaatgaatgttatgctacacataaatgaaaggttttgtgtatgtaaatgatacaactgaatatatacactgaagattccaaaatatcttttaactgatattatctcaaattaagatcgattatttctcattaaatatgacgttctcagacttttaaccttaagcttaagatttcaggggaaaggttctagaaagtatccaatctttactgtgaagtttgactgtaccttacaagtacctagctaggagacagataattttgtattagatcttttttgatgacgtatgcacttgagagcatggtgatggatgtattgcatgtggtaaaacgtgttcatgatcacgtcaaaattcaactgaatatatttttttgtacgcgtaaaaaaatatctagttatatctaccaaaaaaaatgttgacgtagcaaattaaaaacatttaaaaggtaaacggttagattttagaaataaagatgttatttatttttagaaaaaaaattatattgaaattttacacccatttttgagtaaaataataaaagagagttcttatttgtattcctttttttaccttaaaaaattttacacattttttttcattttgatgaattaacaagagaaacactgacacatttactaattactaatatatattttcctttctcttcaaaataaagtctaaagcttttagatcaagaatgagaaatattgtataattaaatgacaattttaggtttaagtaaatactttgagtttaaaccttcgtgcattctgtatttttaaaaattaaaatgaatactaataatttcgacactgaaatatacactctaaattttcaacttcaattattgtatgctttagttttcatccttccaaagtatgaaagtatggagtccaaagcattcaagtgttaaattaaccgaatattcaagcaaattcagaatagaacaagcaagcaaagcctttttttttttcttatctatatataagcattatattttagagagaaaaatcttagaaagatcacaacgaagaacttgagagtatgacaaaaaaatttaacacttgttttggtaaatttttataagttttattaaaataaagtttggaaatatattattttatggatatcagatgaaatataaatcaataaaaagtatgttaaaaatgtatgaataacgtgttgttagaatttctaaaagaataagatataaagttttgaaatatcttcttttgacaagaaaaactaaaaaaaaaaaaaaatcttctatatttcactgaaaacgaaaaagacccaacgggaaaagaataaagaaaaaccatggctttctaacaaattggggaatggaagtcaaattagacactataaaggtaagaataaatacgtggaaaagctgacaataaatccaatctaataggcctacctagctaactcgtagctagtaattataaaaccaaaatccatgtaactgaagcagcctaaacaagaaaatcaacccaattcaaacaagggccacctaacaaaaaaaaaaattgatccaacggtgacacatcaaagccgaagcatggaaattaaagaagggtcatatgaccaaaggatcttaataaaaagttgcatatacattcttgtagtatagtttaatgataaatgaggggtggggacatgtgtatagtccaaaacatgcattttgttaaatgcatctgcttccccctagtcctctgtaacagaagggcagttaatataaatacatgcaattggattcattgatctgttttgtgtcatattcattgggtccatttccctggaccgcatcaagttaggggcattgaatcatctaagtctccatcatcataaacaatttccgtcctagctagcctaccattccaaattctggtaaaagaaagaaaaaaaaagcaaaataatgaagcaatattaatgataatttatagtagacatgcatctttggcgacatattcttctttgtacactcgttaaaactaaaagggaaggggaattttggagctggtccagttggattctctgtaattaatttgtaatactttaatgataattctttgttgtttgtatgaaaaatataaaataaaaattacactagtcacccgtctgtttagaacttactacaatcacatcacttattgttgaattcgtacatagacctctcatttttgcaatatccttatagatgcacccttacacgttgacaatgttatttctgttaatccaaatccatcacatgtgatacacatgcttgtttaatgaaattataggacaaatataccttcatctttctcattgcacaccctccttttaggaataacaacacaccatcaacccttgtacaccaggccatgccttgtacgatagccttgtacacgagtccactgagtagcgtgtgttccatgccgcactagatctacgctcatgcttacaatgatttcgaattggggtcgccgacgaggtcaatgatgtcgttgccaacattgcagaagttggtgacaggcaacctcttgtgcttgttctcattagcaacaggtttgtgaggaatacgttggagtctttggctttgggtcgaagtgttcgaacaaagtctcagaaggggtgggatttctgatagggtggtgcgtttggtggtgagggagtgggattagagatttagattggggtgagaaatgtgaagggtgaaaaggattgtttttgacatttcaccaaaagttaacattgtcacttaaccggtgcaaaaaaaatgtattttaatagaatgagtgctggtaaaataagtcctaaacatagggaagatagatgtaatttgttcatataaaataaaaataaatatattaaatgtttcagaaagtaatactcaatatttttttaattaatattatgatgttattgttgaaaagagcaacaatatatttttttagaattaattatacttctaatttctgtagtttgaattatgtgtaattttacttttcttagtttacttgagccaattatgtcctcttgtttttaaaattaaacaaatttgatattgttgttgttctgtctgttatgaacagatgtccaacaatgaagttggatgattgatataggatcaaactctctctaagaatgtttatggtggtaagacacttcagggaagaagatcacaatgctcacaagagaaacaccacaattggatgtggggtgtgtgcactttgtataaagaaaagagagttagaatgtgtgtgtaccttattctcagaatatagccctatttataggcacaaacctagaagttatctgtggagaaatgcccctgtaacgtcgtctgaaatgttcggccaataccttgagtcagttgagagcacgttctagtattattgatggggtagattgacttggtcatagatgggcttcttctctaattgggcatatctcttactattcgtaacagatgcccccagcccggttatcaagcaatctggatggccaggatgtatcgtttgataggtccactcttcaacccagccgttttatgccgagctaattagcctggtatagaatgcttattcaagtcaaggttctcagccatcgccgaatcgtcatttgtcttttcaacaatatctaattagctgcgacccttgggaagtgaaatgttttcgttgttggaaatgacacgtatctcaatcacttaatgctagtcatttctttgcacactttgatcatctccctctagcaaatatgacgcatttgcccttgcgtgtcttttcatatttgtcagttacctactccaagcgttttgtattctggcggttattttcctttttgacttcatatactttttcttctttattccttctttgtgcctcattcaatttccttgtatattcaaccctcacgctactgctcgtgtttgcgctcttcatcttcacttccatctttaccactcatttcctcagtccttctccttcattccaggtattttgcacttcccctatcatatttgtttgttaattgcaatttatttgagtttccatatgccacttctagattatgtgttcttgagtttcatctgttgttcgacaattttcacttctttattttcaagtctcttctttcttcgctttgcacattgaatctcatcgtagcattttcccatggaattctctcctgaggaaaaagtgcgtatacgtagaactgttcctcctcaatccgcattttggttctttggcctccctcttccagaagaggaaaaagaaaaaacccttctccgtgccccatctggtcctggtcattccaaaactagtatcgccaaaccttctaatccatcaacatcagggttaacaccttaaccaaaatctgtgaggtctttaggattaacagaatctagggtgtcccctaaagtcttcatatcttctaatattccccccttttactctttgaaaaccatccatgtgccaaagcagcattttgaaactcgatttgagccctgttctaagtgccttgatgaatttctgtacttagcaagtattaaccacgataaccgagccgaggccttgcttgactcatgtcgtcataacccggtgactgtctccaagactctcccaagcaagaccggggtttccatctcaactcccacctcggactttgggaccgaggtgtttacttctcacacggctaccctggcattggttcagacttcaccaaatactgattttcgtctgatgactatttcctcaggtattatttactaattgatgttctttattttatcgtaggtaattatggatatacctccagtggaagtagttgaggaatctcccttcgtcgggtctcagtctcacctcccttcttccattctagctgctaagtacccttgggttacccaacacgaataaatttattaatttaaatatttaattaaatatttaattaaataattttttttaaataaatgatttgaatttcattttaataagaattccattttttaatattttgttataaattacgatttaaaattttatgttaaaattaacattaacgacgagatttattatcatttttcgcatgtcctcggaaatttagagtaggtgaaaattctcctaatttatggcctaccatacgatctgttatataaataggtaaatgctcttttccattgtggatagcaatggtatggccaatcattgtaggtataatggtagatgctctggaccaagttattattatatctttttccgcttttgtgttaagtttatttatttttcttaataaatgattcgctacaaaaggatttttttttagtgaacgtgtcacagttaatgaggtgttacgtaacacctcggtcttggatctgggaagtattgccatgcttcccatcgggattcaagagggttttagcatccgcgttcccaacccagacgagcccatctgctctacccaggaaagggacgatctcgacttttcttttcttttacagggatgtagtgacttgtttaggagttcactttcccttttttgatttccaaatgcaagtgttggatcactttcacgttgccctttctcagctccaccccaatggctaggcctttatgcaagccttcaaacttctctgccgagaactagaggttccttgtacctatcctttattcttctatttatttactgtccatactggctgatcaggtaaggaacctgccgataggaaggggtgggtctccctccagggtcgtaatggccgtggtcgcaacgatcgtaggcttttcgccatatatgccgagtcattcaagggctttaaggacaagttttttaaagttgttgctgaacctagccaccaaccctttttccttagtgctccaggttcgcagcctggggcatgagaatttcctttgtactggacctctgcccatcatgacttccctccttcttcctatcgttttgatgggactagattgtcagattctgatgcttcctctatggctcggatagtttcgtataaggagtcccatggtcttcctgatatagctttctatatcccctatggttagtttgggttcctttttggtagatgcttttatcgtgatggtttgttttaatatctgacatgttatcttgttttgtagccattgagatggattctactcaggcttcgggatcttctttacccccagctgtcaaaattcccccgcctgcccacttaggtgccatcacgaagaagaaaaagcagaagatggccgttggtaaggctaagggcaaggatgctaattctatctcgcccccggcttcttcagatgctatcctcgctccgacgtctgcaaccccggccccgactcctccatctccgacgatcgaggctctgagcacagaactggggtcatcccctattgaagtgatcccgaatcttcctgcttccatccccgcggctcttatagtgcccgagcttgctgaacaatatattcagttggcaccccgatctctctgggaaaggggggtgatgcaagaattcttcaatgtcgctcgggcaccaagaagattttctgagctggtgccgttctctgaagctgaaatgtgggacctcagtatgattgaactggcatcgctaaaaggcggcaccttggttgagagcctagtgactttgaacaagaaggcttgcaacgtggttgtcgagcttgaggcttcttgggatgagaacaaacggatgcaggaagaacttgtcatggctcgaaatgatatgaccaagtttcaagtgtcagctagggaatcttatgcggaacttgaggcgtctcgggccgagagagagaaagctcaggagatggctgccgaagtggcattcgatcttagatatcttgggctgagcttaagatttcccgggttgagatggagaaatcccagacatcagcagccaaattggcgtccgataactctgccctccggatcaaattccgagatgcccatgatctctgtgaatagatgatcagattacatgatcagaaggtcaaggagctaaccaaagcggaggccgagctcaatttcgtgaggtcataagtggctaagtttgcggaggctgtaaaatatgggaacacttcacacttaaccaagaggaggggtgaattggttagtcttggtaatttaaaactttttggataatcaaaatcagagtttttgccctttttggatctttatcacaaatacaaccaagaacatttatccaagatcaacccaagacttgtaatgcttcaagaaacaagatataaaacagaattcacaaagaaaacaatcaaatatgcagaatataaatgaacacacaagaattatactggttcacttcaaacactatgaagctacatccagttttcttctactcaacactagagtagagttccactattgcaaataatattcttacaagacaattacaaacttctctttatcaaccctagataaagttcagaagtctaaaacactattagacccttagaagccaaaacccacactgagaactctactcaactgtccttagagaaacactatctctaatcttgcaagaaacccacttacaatagaacttcaaaaataaagattcaacagaaagtttacaaccataaagagtaaggaaagaaatcacctgatgatccaaatatgatatgcataaggatgaaataccaggttgaatgtaaacacaatatgcagaacaagcctttccttaagctttgtgaagaattgtcttgcttcactaaatcctaaagacccataatggttatgatggaagcaagaacttaagaacccagaaaattcactttgtgaaagcttagaatgtctataaaatgctcagaagtcgaaaactcaagttattcaaatcagaaaggcatgggttctatttatactaaaaattgtaactgtcgtaatcgattaaaagcgctctagtaatcgattgtttagcatttgtaatcgattgcacacgctcccgtaatcgattaaagtgttcatagcaaattctgggttacagcaacgggtcatttaattgattatgtcgacgtgtaatcgattactccagaagacttctaaaatcagtttgtactaagtaatcgattacaataatcggtaatcgattaagacagacattctaaaatcatgtttgagtaatgtaatcgattacaacaaatggtaatagattaagacagactaagtgcaaaacatgaaatgaactaagtaatcgattacaatggatggtaatcgattaaggcagtgtgatcactttttctaagtatgaagtgtaatcgattacggatcggtgataatcgattaaaccagtcactaaggcagattatcagtatgctaagttgaaataatcgattaacccgatggtgtaatcgattaaattgttcttgatatttttccagaaagcttgaagaacaatataatcgattctttgtgtatattaattgattaaaccaggttaaggctatttttccaaaaacacttagcttcttttaagattcaaaacaattacttaatgcctttgtgatataatcctaagatgcttatgaatggtatgaatgcagtgacttggaacatcagaattctttctttccttttacaattaatcacaagcttctcttcaagccttcaagcatgttaaaagtcaaaacacttccaagtcttcaaattacttcaatcttcaagtagctccccctcaaatcaatagaggcttcatttaataatgttttagatcaaattcgtttcttgaacctcgggattgagctgaacacgtcgggtatgcatttcaagtcatatgtcgacggcggtgccatgtttactctctctgatagtgaagattcaacggatgatgagccaacttcaacaaacccccctgacgcaaactaccctcgaggggatgactgaagggacgggatgcggtttgtttttgtaatcattttcgttttatttgaaggtccgggtctttccccggccttgcacattcataccatgccattttcatttgcacaatcggcactttagactattatgtttcgtttcgagctatttcttacgcgcatagtatattcgtttagctcaagtggccaagtataatattgcccgatttagtaatcgaattaagtatcgggtcttggagcagagtttatgacattgggttccaatcctttcaaccatcaatgtgctgcataaacattagagaaatgaatgtgatccttagatcgttcattcctgcataaatgatcatgtcggcttgatcagggtcgaattaacacattgaataattgctaggtcaataaaacttgtgcacaatatatataatgtccttgtaataaggattattattgatgttctttgaagataattacagaaagttcatgatctcaatgatagatttacacgagtatcatattcctggtttacaaaatcaattactgagaaacacatgaatataaacttcaaatattaatccatgatctccatgaaagacttacgcggatctcggatctagcgtgtcaattaaggagaaacacatggttatcgtggataagatcttctagctataataaatttttaacttcttggcattccacgtgtgctttacgtcctttccttcaagggtctctagcttgtatgacctctatccaaggtcttgtgtgactctatatggcctttcccagttaggcgctaactttccgtctcgggcattcttatttccaatatcagctcggcgtaacacgaggtcacccttttcgaaggacctcggcctgacttttttactgtattggcgtgccgttatacgtttcatgtggagatctcgttggtgtgccgtagttcagacttcttctatcaggtctagctcggtggctaacgctgtgttattatcctcctctgtgtgggccgtatgttgctttctccacgatggtcggccaatttccacgggtatcaccgcttcgcatccgtacgtcatcctgaaagggatcttctgagtagttggttgggccgtggttctatatccccataagacataataaagttgctcaacccagtttggtccggcttcatgcattggcttcttcatcccatccagaataattttgttagccacttcagcctggccgttggactgcagatgttctactgatgaaaaatggtgttttatgtggaaaccgatcatcatttcttggaacttcgtatctataaactgtgttccattgtttgtgatgatttctgttggaatcccaaatcttgatattatgttgcgctcgaaaaacttctgaacctgggccgacatgatggtggccagaggctcagcttcgatccacttcttaaagtaatcgatgactactattagccatttcatttgaccttttgttgccttaaatggtcctaaaaggtcaattctgcacttaaaaaatggccatggagccgtgacgaagctaacttggttggtggcgaccataatatctttgcgtgcttctggcagttgtcacacttcgtttcatgatctaatgtgtctgccttcatcgtcggccagaaatatcccgcaagaagggctttcaatgctaaagatcttgccccatatgctggccgccgttaatgccttcatgtatttttgtaagtatgtactcggcttggtccgggttcaggcataacaacatcggggtatgaaggcctttgcggtataactcaccaccgattattgtgtaaatggtagcatctcgtattaactttctcgcttctatcccgtcatctggtagtatcctctgctctaaatagttgataataggcctcctccagtgctaggccgtcgagatcaccatgacgcatgcgggttgggtgacctcttgttgaatgatcgtttggtgattgcccgtatctttagtgcttgccagttttgacaatatgtcggctcgggagttttcttctctcaggatatgggtgattacaacttcatcaaactctgctattatttccttcactttagccaggtatttagctaataagtgccctttagtttgatatttcccttcgatctgcgcagaaacgagctgcgagtcggtgaagacgttgactttcaacgctccctgttctctgatatgcttgagcctgcaattagtgcttcgtactctgcttgattattggatgttggaaaattaagctgtaatgaatgttcgagtgacaccccctatggattctcgatgatgaccttggctccacttcccttggcattggacgagccgtcaacatataattttcataccaggtctttctgcttgcttggagtcgtcggggttagctccactacgaaatcggctaaagcttgagatttgatagcatgtcgagcttcatatttaatatcaaattctaacaactagatggcccaattcatcattctgccggctagatccggtttgtgtaatacttctcggataggttgattcgttctaacaataatggtgtggctttgaaagtatggacgaagcctcttggccgtggtaaggagagcaaaagccactttttcgagcttctggtatcgtaactccgagttcttgagagctcagcttacgaaatagactggtgactgagacttgccaacttctctgactagtacgacacttatggcttcttctccaactgaaagatacaagattttagtctttctccaggatttggttttgagagcactggaggtgaggccaggcatttcttaatctcctgaaaggccgcttcgcatgccgggttccatcccacggtagcttcctttcttaacaatctgaagaaaggaagcactttctttgcggattttagaagaaatcgtgttagggtggccattcttcccgtcagctgttggacttctcgcttgttggatgggaactgcatgtccaaaatagtcttacatgtatccgggtttgcttctattcccctgtgggtgagcatgaatcctagaaacttcccaacctttactccaaagtcgcattttagtggattcaggcgtatgttgtgttgcctcagtttgtggaaagtttcttctagatcccggatatgatcccccgtcgcagttgttttcgttatcatgtcatctatgtatacttcaagattgcgtccgagttgattagcaaagactctgttcatcatccttttgtaagtggccccgacatttttcaagccgaacgacattacattgtagcaataatttgcttcgacgccccgaaatcccatcctttcctaatcttccgaatacattgggatttgattatacccggagtaagcattgataaatgacaatagctggaacccggaggagttatctacaagttggtcgatactcgacattgggtatgagtccttggggcaaactttgtttaaatctatgtaatcaacacaaactcgccatttcccatttggcttcttcaccatcaccacgttggagagccacgtggtgtattgtatctcccttatgaaccctggctccaatagctcctggatatgcttctccaaggcttgccttctttctgggccgaggttcctattcttctacgtcactggtttggagccgggatacatcgctagtttgtggtagcaaaaggtaggttttattccaatgatctcggaagctttccaagcaaagatgtcttggttttctcggaggcagttgattaatctgtctttggtttccaaattgttttgtttgcctatctttgtgatttgttctggggagcttccaatctggacatattccagctcatctgccggttctagtctccattcttccacatctcgcatatctagctccaccaagttcaccggcatctgacatgaacgtttttcaatcttttgctcctcctgatttccatgtcttatctgaggtggtgaaaaggagccacctttactttctcttattgtattgtaataacattgcctggattctctttgatctccacatatggtaatgacttcgccgttgtttcccaccatcttcatcttctgatgcttggtggacattaatatgtcccacttataaagagtcggtctgcccaggatgatattgtatggtgaagagaactaggcaacggtgaatgtgactctttctgacttgaagcctcctttgttcctagtgtgagtcggagatcgatggaacctttaagtctggtgcttccgccattaaaacctaccaacatggttctacacggtttcaggtcttctttgtcgaggttcatctttttgaatgcattccaagaaatgatatcggctgagctgctgttattgacaaatattcttttaactcggcaattagctatcgttccagttattacgaggccatcttcgtgaccgggaatcacccttccatatcttcttcagtaaaataaatcaacgggggtgtggttctcttcctgttttccttgaacctcggttgagctctcaccgacatgacttcccttagatatttccttctttggttcgccatgtcgcctcctcctcccctggctcctgaaatcacattgcattcgaattcaggttccgagaactcttcatccttcttgcttttcttttcgtcccggcttttatgttcgtgttgagggccttttcgcttgccttggttcccctgtgtcttgatcacataccgccttagcttaccttctcagataaacttgtctattgcatcttgcagatcccaacattggtctgtagtatgactcgatccgttgtgaaattcgcaaaagcaagaataatcgagcccctcttttttaaacacagaccgaggccgatccaccttcttcatttttgtaaaagccacttctctccatacttgcacccgggaagtgttcaacgaggtatatttatcatacttggtctcgtatcttcccggtctggggccgagatcgttattccttgggaggggcatttccgaggttttggtggtgtctcggaggagagtttttccttctaggaattgcattagcaatctccatttgctctaactccaaatacttctttgatcggatcctgaattccagcaaggtcttaactgggtccttgtaaatagatttagccaggcgtgaagatccattgagtccagtcgacagcaaatgcacatgcactttttcctccaggccctgcacctgtagagcgacctctttgaaacgatctaagtaactttgcaatgtctcctcgggttgctgacgaattctccccaatgcaaattcggacttgggctgtttcttactcgttgcaaaatcaagcaagaacttttggcctaaatcctcgaaatttcagattgatcggggtgggagcgtgtggaaccacgtctgtgccatgcctgacaaagtggtaacaaagatccgagatattattggctcatcgatccctcagatgcagatttgcgtatcgaactcgtcaatatgcacttgcggatcctgacttccgtcatattttgacaggaaagaaccgttgaaatcctctatgaattgggcattaacgatctcatccacaaacagactattattgtgctgaccgggtcgatatttcttgtgatacaccttgtcccccactcttggttgatgtgccggactctaaatggactttgccgggcttattcctgcttcagtggtctagcgcgggacctcagttcgcgtatcatgatgctctggatttgcctcccgtgtctgctgatgagagggtgctccgagctcaaaatggatattttgccctggtgtactaacttccacatcatgtgcttgctgctgctgattaatctgatggcgcgcttccacctgtcggggctgctcctaggccgggttttctatgtatctgatgcaccgctccatgtgctgcaagcggtgctctccatcatatctccatttcacgcaacgttcatctagctgcgttatcatattgttcatatccttctgacgttgaagggcatatcgcctttcaagtcgttcaatctgggacaagattgattccaatgcgttgttaacaaaatgctgaatttgttctttctccatccctactgatgtatgttgtggattactcatcctgaccgccctcggctgaacgggagatgatgcagtatcggaaactgcatcttctacccggactgcatgtggtgcttcattagcgggcgattcttcttgctggtgacttctctatttaccattgtgaaatgtgggagtcgaaatttatcgtttcccacatacgacgtcaatgttctgtctgttatgaacaaatgtccaacaatgaccttgggtgattgatataggatcaaactctctctctctctgagaatgtggtgagacacttcagggaagaagatcacaatgctcacaagagaaacaccacaattggatgtggggtgtgtgcactgtgtataaagaaaagagagttagaatgtgtgtgtgtaccatattctcataatatagccctatttataggcacaaacctggaagttatccgtggagaaatgccctcgtaacgttgtccgaaatgttcggccaataccttgagtcagttgagaggacgttttggtattactgatggggtagattggcttggtcatagatgggcttcttctctaattgggcctatctcttactattcgtaacagttgtcatttttgttctaattaaaactcgaattttcatttttttattcaagacctttacaaattaaattttttaaattgttttaactctcatttgctcaaaactcaccaactaaaatatcaagatttgtccaacaataaagttttgtctcactatatatgtgatgttagctaagtggatcagataactttattgacatggttaaaaactaatacttcaaaaatattatttagtctaagatctcccttgatgacttcctccaacatcctttttggtttttctcttcttctttttataagaataaatcatacaatctattcttataattaactagtgtctcttatggctatggatggaaatgggttaggtcgctaagatttgatcattagagacctttagtttagtttgtttaagatttgatctggcctgacttgtttactataaaggtaaggctaagcctttttcaaaagtctatttaaataaaaagatcagactcaagctttaaaaaaagtttattagatgtgtcaggctgacctatttaatatatatatatatatattaaaacttaaaaataatatatttatttttctaaaaatattttttcttattatgaaagtggatgatcaaccacttcacaaaactatcttaaaaatctcataaaatgattattacttattgggaaatataagtaagatgttgagacattttttgtttaaaaattgtttatttaactttcctaaaaaatgtttcttcatgtttaggagatggcttgagaattaaaatttttattcatctttgtatttaacttgccttggttcttatttcttatttattttagtatttgacattaaggctagattattgaatgaaacttatgatattttatttatcttacttattttgtttataatattttgttgaatacttaaaaatgctctatttacttttaactttttttttcacgtaccaattaaaagagaagtatgtgtctttattttatattaaattttaaaaagtactattcaaattttcaaagttttactgtatagtcattatattttctttattgtaaaataaactttttaataggcttgtaagtcaagacagatttttaaataggtcaaaccaagcttattaaagaagcctatgacagataaataggctaggccaaactttatatttttaaatcaggtcaggactaaccaagcctggcctggcctgtttccaccttactaagttgtggccttctttgtatgtgtgaaaaccaccttaacaggttttctaccatctttttctcaatgggtggcacaccaatcttttctcgcacacaaacacacacacacatagtcattatgtatgccctttcttgaatgatcacacacatccatcttaacattatcatttttattatttccactttttctcatatgttgtctctttaaagcccaacattcattttgtctatgtttttttatagtcgatcccaagcctagcaccttcaacaaccaacttaaaactcattgttctaccaaacatggattattcaattttacccacaaaatatttttatcaccaaacctaatattattttaaaattttactaaatatttatcttttaaacttttattaaattatttcatatttcaaactcattataagcccctaaatatttggacagaaaatgataattcacaagtattaaaggaaatgaaattgacaacattaccaaatttgattaattttgaaagtataaaaattcaattgattggaaaataattaaaaactaattacagaaaaatcaaacaaaaaggccaaatatttaattaagcccatttttgatgcattgtttattatttattttttaaataataataaattagttatctctttaaaagatgcttgttaagataaatattatctttgaaatagattgataacggtatttttaaaaatgttttaatattttcttcaaagaataagaatgattagtgtactataccgggcccacaggagattgggttggaggaaaccgacctccacgacgtggtactgcccttgtgggtgttgaggacaatcaccaagtctaaccttggtcctgctacttatataggaaaagacaccaaaagaaggtaggtaacattctatccctactacgctcttgacttacatactgacttgagcgccagagtcccttttcaggtactcacccccaccatcaataaaggtcccatacacttagagagaaagagagagagagagacaaatcggatcaggttagaagacgcaaaccatggtaagatcatttggtgcccaccgtggggtcaaggaaaatttccttcgatcacaggattatatggtaatgacccagagctcgacgatcagatcaacggaaatgaaagaggcttccgtaatccaaagctttcaagagcaattagaggctctccaaaagagagacacagaagaaatggccacactaagacaaaaacaagaagcagacctcaaggcactacgtgaggaaaatgacaccatctgagcttaattgtaggcatcgaaggccaacacaattccaagtcaacgaggggcaactgagttggaacattcctacatgagaccaactgtcacaccaccaccataggacgatctcatcaaaagttttatagtcaaccttctaaggcgtgtcgtcgacaccctttcgttgatggcatcttggatacacccattgcacagggtggaagccattgaacatcgatcgctaagacaaaactacagaccccgatgatcacatcgaagcatatgtgatgcaggtgaacctattcactaacgataatttcgtcctgtgcaaagtattttcgagctctttaaaaggacccaccttgacatagtagcatcaactacccccctggactaccgatacattcgaaaaacttgtggagcgtttcggtggacaatacgccacacactgaccacatcacacaacataggtagccgtgataaacttacgtcatgcaaacgatgagtcactgcgagacttcatgaccttgaacctgaggtgactcttcacgccatgataacaacactcaaactaggagcgtttgcaaacagcctatgcaagaagaggccatcaagcatggacgaactaagatgtcacgctatcgacttcatacaaatggaagaatcgtcgaagttccgtgactttatgacaacctccattactaaaaaaatagttttttacaacgtaccttttatgacggttccccaaaaactgtcttagtatataaggtggtgacaattttgtaaatatgagatttttcaatgaagacgatttatcattccatgacggttttgcaaaaattgtcttagaaggttgtcattctacgacggttttgtaaaaaccgtcttagaagtgagtgtgttttttacactccattctacggattcctactactcaatgctccttgatacattagagtaagggcgatgaaagcatataaccctgggagaagagaagagagaattgaattggaaaaaagagtagagagagacgataggtcaaagaaagaggggagatgatagttgaagggtcatcgaagaagatgatagcaacataggaggagatggtggaggcgagggttccgctggcgtacagggaccaatgcgcccacttgctcatccctctcaacaagtgcaggcaggccaagttctacctcccatggaagtgccagaacgagcgtcactcttacgaaaagtgcgagtacgaactcgtcatggagagaatgctccagatgcaaaagatccatcaaaaccaacaaaaggccaacgccaaacaaccccttatcccgcttcccaaaaccaccaatgcttgattcattcattgtaagctcctctcttctttctttttatttcttcaattatctcgctttctcactaatcgggagttaggattgctgattccatattcttaattcttcgagggtgagtgattgatgttgttataccaattcaattacggtgttgtttctctattactaactcggattactgaatttgttgggatacatgtctttgttttagttacttaatttataaatatgtgactagtttcatggctgaaaaataacccttcatattggtgatagtttggggtatgtagtataaccttcaaatttgcattattttgaatttgatcttattgtttatttaccatatcgttcaattgaaggttttataaatgatatgaaggtttgtctatttggcctatgagtggaatttttttaaatgttaaaattcttttaaattattttatcatctcaaaataaatctcctgctttctctttcttttggcttagtaattatatgactttggctgatatcaacaatgtttttttttcattgatttcttttcgtactaaaagttgtgactatcgacattgacaagaattctgcaatgctggtgatgatcatgatcagcttcaaatgctcaagaactaatcttattgtccaacgtaattgttatctggctgagcacagtattgtgactgagcagataaattctttctgcttattattatatatatgtaggttgtgtatctgttaacttccacctcccccatttttgtgacaaatagtggttattatatattcatttctataactaaaatttatttaaacattgcattgggaactgcacagcttgtagtttcttcctagactgtagagtggttgtttcctttattcccttctctcatggaacaataagttttatccattgttataaagaccattatgcattctctttacctggacatgttcactgagttaataatgttcaaataacttcttgtcttatgataattttcagactttgcataatacggtgacatcagaagttgataaaatgatgcttatagatgcaccacttttatttcctcttggcaggtaaactcagaataatatctctaaatatcaaaagtcccttgtagtagagttttcttctgttacaaccaggagccaaaaacattgtttcttctgcctcgcctttacaaatagaaaaaaatggaccttttctaattaattatattcagttcattagccaaaaacaagtcatccatgttaagtcacaacctaggctagtgaaaataaatgaaccaaatttcagaaggagtggtcaaccatttatcactatatgtaaattgaataatcattttgtttttaatttcagttgattgttccaaaattgccagattccagggtttcctaaatcatcagaaaagcagaaaacataagttatacatctcaattactgacttgcaactaaacattctctaatcaatctagattcaattttctagttcagctttgtttaaaaccattttgctttgaaatctaacaacctgtttgtgtcttgtgaagcaattggccttggctgggttgcacaactcaaattcattccataaagtcattgacttttataggtacttattattgcttcaaatttttgtttgcgataatttattctgacccttcacccttgttctttcccttttgttaatgttgtcatttgttacaaagtcatgtgacaaaatgccctacctcgggtttacagtgtattcttggacccaaatttatgtgtctgctcagacattcactctttacattacactagcccttaattgcagttatcttaggagcttttttacctgacagaattccatgcatgcaatgttcaagctttctaaatcactgaatgtaattgactctttggtaattgattctcattctaatattgtcattaaactgaacaactgatgtgtaattccatatcaacattttgtattagtagctgggaaccatggctttcttctgttttacatgggctattgtggccttgttggccttggctacaaaacttgatccaaaattaaaaaggttaggacttaagacaataaagagaagaaataatttttatcatgataatttgatgctttttgctctatttttctatcttagatctctagctaagataatgtggtttcttgatcagttttctggaaatgtgacatataatggttatgggatggatgagtttgtaccccaaagaactgctgcttatgtcaatcaaaatgatcttcatgttgcagagttgacagtcagagaaaccttggccttctcagcaagagtccaaggagttggaactcgttatggttagtctacatgaaggtaacaacttgtaggggatgtgtttttcccattttacttacatccccaagccttttatattgtttaataactggtaggtggtagcattcaaaccaacgagagaaaaaacatgacagcttaatggttatagtattatattggtccaattttagtattcctttcttcttcatcttattgctattaatttcaaaatttctcatccaaaagaaatttattataggtgcatcatccattttttttcattcagaaattaagtggttgtccctttgacttttaatgcacaggctgtagcaactgaaggccagaaggcaaatttgataacagattatgtcctacggggtaaaatctatttttcctaaaccttcttcaatcatcgtgaattcattataattttgtgataaaatatagaaattcaaaatacctaatgtggaacttttttaatcattaagtaactctgtagtgataaaatatagcattttgttgtacatatttggtatacatatttattattttcaatttatctttaattatttttttcattactatctatctagaaaaaaaagcaaaaagtaacattatcattctcaaaacatgtcatatttggaggacatcattgttactctccattttgttttcctattgaatgttattagtcatgtgaatattctagagcttatatatatatatatatatatatatatatatatatattgttaacactttgataagtgtactaatttgttcaagtaataaagaaataataagactgaatgtcgattcctcaaagacttttcttgttctcagaattagtacacgtttgtttctaaataattaatgaatcgatttagtttgtagagtaattgacatataattaaattgacttaatgtaaactataaagcgtaataaatacaaagaaaaagacacaaacactcggaatgatgtggtgatggttgaaatactgtgcgacagatgttgagggctcaactaatcgaaactaactttgatgcgatattaaaggtttttcgctattcaacattattctcgctcacattcatttactagtatattctagccttgattcctcaagtgcaagatcctaaaccacttaatttcgctcctaatatttgcattacgattaaagatgataatttaggttaaacaaatcattctattcctagaaatgatatatttagaagtgtttttcagttctaaggaaataaccattttccaatgtattaaaacctaaacaaagcatgagattggatgatcaaactactaacatgataaaatctcaaaaaaacaataataatgtataaataacattaaatagataattagaatcattacatcaaagcgtttgattgttgagcttccaacaaagggggttttagcctctcattttcatcagagacctatacaaatggaaagttagggcaatggaatgaaatggatggaagggaatgaggaacaaaaatgatgaagatgcagctccaagggtgtggaaagaatcctctttcgtgacctaggtgttgtggtttctgtctccaagagctggtagaataaatccattttccctcctttttgccttaaaacgtaacctagtgtcgtggtcacgctcttagtgcaaaatgtcgcactgagagcgcctttagtgtccagttggataagtgaccatgcgttaagcgagctggttgcgctaagtgggtttgtcgcgctgagcaagcctgtcgcacttagcgagtctgtcgcgttgagcgagcagctccagaccttgaatccaccttccatgcccttgaaatgaatttctacaaaaaaatataaccaacatctcataaatcaactaattttagcatccactagataaaagctcagaagaagctaattcatatgttttaatcacaaaaagaagcattaaaagaggaaaagatgagataattgctaggtaatttatatgtaactttacgtatgcttaacaattatcaaatatatatatatatatatacatatatatatatatatgttgaactattaatttattgtatttgatcaaccacacttatatgaaggtgcacatgcaagtatataatatgtgtagagcatctgttcaagtaccattatctttctatgctgagtgctgtcattttttgcgtttctcactacttgttcttttttgttgatacgtacatatatatacatacagatatatagtctattcactcaaattaagtggcacaagtgctcaagattgttgtctagtatcattcaattctttcttcactctatattggatacacacacacacacacacacacacacacacacacacttagacttatagtttatagcgagtaattgatgatgttgtcagcaaaatctgaattggatatcacaagcttagccccatcttcaccttcaaggtcaccaaagtggcctatgtactatgtgtagagtccttcaaaggattctcatgatgggttcaagtcatcttcgatgcaggcaactccaatatcaaacagttctatggagtctccctcacacccttcattcgggagtcactcaaggaactctttcgccagccactttttggggattttcaggtcatcttcgggaaggaaaggaactcaaggaactactttttccaccttggatgcttctgaaaacttgtttcttctgaggtggattatattatataagtgttggcatatatgaactactataagtagtttgcttgaatgttttatatgtatttttatctatggcttttccgtctactttgaagacattattttgaattgcttctgttgtaaacatattgaacttgaaatctaattgtgtatttttgaaatatgttaattatattattttccttactttcaagatcacataaatttgaatggttttttattattacatcaatttgaaaggttttcattgtgtactattttttaatttttggtcttgatcctatatactttaaatatagtcatttggcatcatactatagcatgaaccaaactttctccattagtccctacataatgacttactttctataaaattatcagttcttagatcaggccagcatttgagtaggtcatttttgtttgtctcctgataattgctaagcatgcgtaaagttacatgtaaattatttggcaattatctattcttttcttcttttaatgcttctttttgtgattaaaatataggaattaacttattattagcttttatccagtggatgctttaactagttgatttgtgaagtgttggttgtatttttttttgtagaattcactgcaagggcatggaagatggatttcaaagtatggagctgctcactcagcacgacaataacgactcgcctagtgcgaaggctgacttagcgcgaccaactcactcagcacatgatcacttatccagttggacatttttaggcctgctcagcgcatccttttcgcgctcagcgtgcaccacaactctgggctacgtttaaggcagaaaaggagggaaaatggacacacttacacttgggaagaaaatagaagcttggagttctgctaggtcacgaagaagacatccttccacaccattggagctacctctccattctatttccctccttccatctctttccaatactctaatcctccattgttgtaagcttctcatggaaatgaggagctaaaaccctcattgttgggagttcaccaaccgaacactttgatgcaaacattctaactatctattcaatgttatttgtgcattattgttgtttttttgagctttattcatgctagtggtttgatcacccatttgtatgctttgtataggtttttaatgcattggaaaatggttaaattccttagaactaaaaaacgcttctaaatagcatcatgtctagggatagaatgattttgtttagcctaggttacgttagcatctctaatcgtaatgcaaatcggttaatgtaacccttgagggattaagggtgaacttaagtgatttaggtctagcacttggggaatcaaggttagactattttagtagatgaaggtgatcatatttaatgttgaatagagaaaaatctttaatgtcacatcaaagttagttccgattaacgaactcccaacacttgtcatatcatatttctcttcgtccacatcactctgagtgtttgtgtctctttctttgtagttattacgctttttatttacattaagtatagtttaatctcatgccaatcattttaccaattaaatgcattcattaatttcttaacaaaaaacgtatattagtcttgagtataagcaaagtccctctggaaaccgacattcgatcttatcggatctttattacttggacaattcggtgcacttgtttaaccattaacatctgcatgcatataatttatagaattctttagtaagaatataaaataaattgtgtttctttctaagtaagttaaaatttacttctaaaaacttaatttttaaaaaaaaaaaaaaaaacttttttctatattggtctagattgccaccccccatcctaatttttcttacaaaaataaacttttaaaaattttatctaaagtaggtcataaatttattttaacttatggaataaacttaatttttttttttcaaaaaatctgttaataaaatttgagtctaatcaaggacaatcttcgtgaaggaaactggaaaacaaaacaaaattgaacatgttagtgaatatgagggttatatcttggagagtgcacattctgagtagactttttgttgactttgttcttcagtatcaatttttcttgtgtactttatttttttgttttaagtcttagatagcaaagttagatggatttgaagtgatattagcatttgttgattcatcatgctgtcttgtgactaatgaatatagttggaccgcaaacatggaaaggatcatgaaagcccaggctctaagggacatgtcttgttggtaatattttaattatcaacattggtcgttggttgcatttcattattggtttcttttagtattagctctttacgcaacactagatttgggtatggtttcaggtagccagtagcttgtgtctctggtgaaatggataaatgttgtgcttcttaattttaatatgcctttaaatgtgtttggtctactctgctatcttttcttgttggttttaattgtttgtctgtcagatttctatgttgcattttttcttacacatagcaaataccaccttgttgaatgtgcttctcaaatgcatatgatatattgcccttaagattgcatgttatctagatgctttgtagatgttgtgtgtgagatcctgcaggagtcaattaacctttaaattctgatattggttcctgccccttgggttgtagggtgagctatgaaaaaatttgaggaagtgaagaagcttttatgaaactgaaaataaattcttgcttgatgctaacttgtataagaactcaaaaagtttaatttgaggctccagtaattgcactatttaaggttgccacatgtgctgggttattatcttgcctgatgcatgggatttttagaatattattcaagagttattttttttgctttggattaccaaatttttttctataataaataataaaaagaaggaagaacataattttattccttttgttcagttaattgttgtagtggataatggtccaagttgtggttttatttataatatgcttaatataagatatctcttttcattgttctatgaaatctgttgcttccttttcaatttgatttattcagttgattcctattttttaattattttcttttaaaaaatcagtgagtcacctgattagaagatatttaggtggacaataattataggttttcctttttttaccatatatacttgctcctattgtaaattgactatttatacgaaattacctttttcagtcactgctcagaggtaaatgaaaaaactattgaagatgagaggccaccatctatggctgcaagtgaattagtttagctaagacaactacacgtacacggtctttggtttaaggtatgcaattcaagaatttttccagttttttccctcactccattttttgctcaatctaattagagttttttttttttttttgtttcttttttctttagtcttaactaatacaaaatagaaatttcataaaagaaattcctttgtcagcttttctggtgtttatgtaacactatgacgttgtcattttcatagtcgggttccatgtttatcagtaagaaatatctcattactggtcatgataatttctatgaggccaccactaaaattgatttgattttaatttttttaaaaaaaatatattctaaaatggttctttagaaaacaatcttaaaatctttaatttttaatttttttaaaaaagacattctaagacgagtgaaaaattgtcttagagagtctaagacgatttttggaaaaactgtcttagaattctcaatttttattatttaaaaaagacattctaattagaaagtttacattctaagacgatttttgcgaaaaaaatttcttaaaatcttcaatttttaaatttttttatttaaaaaatatattttaagataaatttctgaaaaatcattttaaaatcctaaattatttgtttttaaaaaaaagatattctaagatgatttttacaaaactatcttagatgttgaaccttctaagacggtttgagaaccatcataaaaaatccctcagaactgttgctaaaagtcatttttttagtagtgctcacaggtacaaatcttagaacaccagaatctacttatgtgtatatgcaaagtatgtccatacctttggttgcatcctttcaccaaactattgtcgacagttcttcaaccaatcaaccaaatattaatgacttcgtctagaaagagcaacatgttgttcttgatgaacaacttcaatcacaagaacatggacgagtacgttgacaaccgggaagaaacaagcaacctcccatatgtggaactggtgaacaaaatcaacattaattgtccttgttaaattcttgtgtactatgaatgtcagtttgcccttgttattgattgaacattgaacactgcatttattgattaagcattgcattttttttagacaaactgattggacattgctttttttgagatgaagtgactgaatcatgcttttttttttttttttcaaaatatgcaaaccaaccataataagttaggatgcaatctaaaccaaacattgtcggtgtgaactcatttgttggtttgagtcacgagagaatagttgatcacctaatataaatagcagtaggggttagatgcaactcaacacttttatctgatattcttcatattgcttaaaacatggagattgtatctgctcttgtgtattgcgatggtgacatgattccatgttacgaagggatagtgtttgaatgccctagtgatcctaaagtcatcacaataagtaaggacatgtcgcgtgacatcttaagaaaaacaattttttatgccaacggatcgaaggttgtagaattttacttgaccgtttttaccgtcaaccaatttacgtaggtgatgtttgtgttgaacacaactctatggagttcaaacatgacgatgatgtggaaaaaatatttttcatctattcaaaatttagtaccatagattcgattgagttgaatgcaacttttgcgcgttcttcagatgaaattctaccatgctgcacaatccaagaatcgctgatgagatcattgctttgatgcgtgatgaatatgtgtagtcattgcgcaaactagttgttctaatttttttatgtactttaatatgctagtccttaagttatttatcttagttttctttatttttttcgccttcttcaatttagataaacttggtttcatttttttaggtacctttactttcaaattaagctacaaaatttaaatattttagattaattatttttaaaatactatttgataaaaatgatagaagtgttttcttttaaataaattaatttaaaataattctatgtgacatgctgtatgaatttgacaacatgatagaaaaatttggaaagaattttaaacaaaataaaattaatataaaacacaacatatgcaaaatatttttttataaacaataatatatataaattaataaaaaaaacaaaaaataaaacaaattacaaaaatgtatataaaaaacgagctaacaattgacaatataatagaaagatttatataaaattttaaacaaaataaatttaatataaaattaataacgacatatgcaaattaaaattttattttatatataaattaataaaaaaataaaaaacatttctaaaatgttttaaaaaataaaaacacaattaataaatttgtttttcaaaaaccgatttcttaactaaattttaaaaaagtccacattgagaaatcagtttcccggatatgatttctcaacatatctaataacacacacaaaaaaaaaaaaaacattagttaaaaaattgattcttgaaaaactgattttttaattaatacgaaaataaataaataaaagctgtactaggtgaaaaatcgatttctagtaaaccaatttttcaccatgtacatgaaagtgtatcatttacataaataatatttcacctgtattatttgcataaataattaattaattttgtattttttcagtaaaatagtctaaaaaattacttaagaaaacttacatttttctcacctcaaaaaggcaagtaaaaactcaaacttgtgacttgtcaaatttaaaatcctatctcttgaccaatttcttaaaattgaatattttctattttatctacatttataattgatagaatttttaaaggatgaaatgtacgataaatataagtttattttcaatggtgttgaataatttgatattttttttttggataaagaaataatttgatctttgaatgaatattcttcctccgcattttatcagtggttttaaggaggatcacaataatattttttttctttttttggaggggagggatcacaatagttggagtaaagtacatgaggattcattcatgcccaattcactttattgttgtattcaaacagagtaatgagaccgcgtgtataattccatacacactgctgttttaaacgacgctgtataacttgatgcaacgtccaatccactttaaagtagatatggaacacagtttcaaatcttctcatgcataaaacaaatttatgtattgtctaacattgaaatttacagttaaaacaataaatatgttccttaaattacaagacccccataataacttaataaatcaacaagctatcaatttttaccaacaaacattcatagatttcagttgatatccctgtccaattccaagttcatgattcatggtatcaaaattatatacaagtagctgtcaactctaaataacctaatcacttgtcttttgcagttgttgtttaatgaagatatccaacgatgatatcaatctgaacacctcatatgttggattcatgctggaaattatcacaacaattaattaaagcatcacggcacatgtttaaatgaaacgaagcatctcaaatttcttggccacttgggtggccccctggcgatttaatttcacatccaattctttaattaatcaattaaatttattgattatatattccaaacgcgcacacatttatctcatattttttatccacaactgtaccctcaatcaatcagagttccaatcgaccacaatattcacacatcgttatgtccactcaattctcaaattaaaaaataaaaaaattaaattatataaaggtaaaagtaacacagaacgaacactttacaaacagctaaacgaaaactccaaattccaaaagcctattttggcttcaacttgtttttcttttattttccaatttccatttttcatcatcgtcagttatcatcatccatattattatttatttattatcatttcgtcctattatgggtcaccttaaaaacctccacggaatcacgtacagaaaaccattatatcagtagggccaacaaccaaaacacccaaacacagccttagataaaaaaagcagagaccccgccccgcgaacgtttgacctttgaccaacacaaaacgacgcccacaccccatggtagtattgtcgtgcaatcacccaccttcctcgtcgtttcatcaccgacttatatttttttttttcactccctcgtcgagttttcactatcactactactgtgcagcaacttaatgaacaacttattcaaacgacctgcgttacgtattgcataaactccatgtcgttttcgagccccgccatggtggccggcgccaaaacgacctccaaatcaacgctgccgtttccctctctccctggaaacgcggaaatctttccgtcgaacttgttcgctttcccactccgaatcgcaacaggtctaccccaaccgaagtcgttgtcgtacatgggaaaacgcggagagcttcccatggtgatcatcgcaccgtcaaagtttccgagaggaaacagtctcggcgcgctctcccaatcctctatgccgcggcgcaccgtagcgtcgtcgtgcgcgatgacgttacggtgcagaagatctgcgcagaagcagagatcgcgcgagaggatgtctccaacggttgccaccgtcgggatgctctgaatcgcattgccgaagtataacgcgtccatctttggctccagacggtgacggcaattcaccgccatccgaaacgtcgacgttttggctggatcgttgaatttcctcgcacgcgtcacagctcgccagagctgagctgataacgactgaaacgacgagatctcgtcgttaccgttcatttttccgttaatttttccgtttccgttaccgttaacgattttccaaccgtcatttacttgttttcccataacttctgttagttcgttgttgactgtgttgttggctttttgcttgagtttctgaattgcttcgcgggagaagtggaacactcgttcccggagtggctggtttacgtcaaacgtaacggcggggccgccggaggggacggtaaggacggcagcggagttgaagacggtgtcgcgagtaaagtccggtgctcggaggacttttttggcggcaccgcctttggtgagggcggcaaaggtgttgaagaagtgccaaaacgatgtgccgtcagtgacggagtggttgacggtgcagccgacgaaaactccgtcggcgagttccgtcacctggacggcggcgaggggtgtgttgaggccagcgtaggagatagtcatgtcgtaagcaaaaaactcctccttgaagcaagagtgaacatcaacgagagacggcgaaacgacggtgtttaaagtcaggtgttttgctttagcatgaataaaatccacgccagcgtcgttgcatacaatattaacgtaaccgttggaatctgtctcaaaccttcccgcaagagcgggaaagtgagagagagcgatagaaagagtgtttttaaaagaaagtattaagtcgtcaaatgaggagggcggggcggtgagtaacacacccttttggatgtaatgacatgacaacattggaaggtcagaaacagagagtttcaagggtttcatgtttgatttctggtcggggtggatcacgcatttggagactatggtggtggaagaggaaggcatttttgtaaaatttctttatttttttctttctttctcttttaatggaaatgaatgaatgcttggttgtgaagggagtgaagtggtgcaagggcttttataggtggaggaagggaaggaaaaggagtggtgtggcgttttcgttttttcttttggaatttttttgcgataggaagttgggtcagaaaagatatttgagtgaatgtggtgacgtggctcactatggcacttggggtcgacacgtgcactttctttaggctggggtcttctacattggaagagagcatgttattttcgtagtttgagctttcgttttcttttcattttgtaagttattcagaatggcgttttactgtttttaaaaggtttaattgtacgttttatattttattttctgtgtaatataaatatgaatatgagaaaatactgtatatctatatatcttttcctttaaaatgtattcttatcattgctaattgtgtaattaaatttgtgtttttcaaaatgatttggactaaaggtacaatagtgctttcgtctgtctcttctcctagttcactacatataacttgcctaatttataatatcttaaaatatagaacttacataatattattattattattatttgaactaaatataaatgctatctttaaatgaactaagctatggactgttactttataatattataaagcatagattctctttttggtaacaaacagattcaatagagaacatatttgaaattgcttatggaagaagactatctattcttcaataggaaatgttggcacactggatttgttgctaaataagcataaggagaaaaacataaaaaaaaaaaagttttaaattgatgaagaggcaaatgaaaatagatgcatattcactgattcccaagttgaacaaacttctgactccctttgctctcatcaaaaccaaaaccaaaaccaaagcttgaagaaaccccaaccagctgcaggaggttctaagtcgaattgtgtatggtttctgaaaacccaagttaatatagtttttgttcgcctacttctagagactaaggctgactatgctactaacaaaacttccaattctcttataactaattaaggcaggtaattaatgagtaaatattggggagagaaaaaaaaataaaaaacttaaagagagatgtctaagaatatgttacttggttcttgaaatttcttttattttttttaaatgtttgaccgattgcatgttgagtttttttttcttctttctttttaggtggtctagcttctttatttctttctttctttctttctttcttgttagcacctataggtgcttttcaaattgctccaaggagtaacactcactatatgttttagtttttcaacctctgcgtctttaatcctaacatctaaaattgtgtatgacacccatgaaaggaaacttcacttcacatgtccaattaatgatactaccataaattaattttcttatatgattcttgacttgctaattgggtccttcttcgctgtaaaggtttgagaatgatttaaacctaaactgataagtaagagtcatcatcaacaataatgttgatatctcagtccattatatcgtaaatttactaaagttaagatcacttaagccttagggttatcaattttattttaaaaataactgatattgtattaactggcagtaaatattgttatataaaaaaatatttagtaaattttaaagaaaagaggttttctagatgaataaaataaaatcattttaaagcatattattagaattttttgagactgatacttaagagcacaaaatatgttttggtaatattagtgtaaaaaatcaatattgtgatcaacatgcacacgtaactgtaaaatgggaaggtgaatagaaacaccataagttccacagcatataaatgtaaaagacatgtgatgatttctgcgatttcctagaaacccacgttttaacactcatgctagtgaagttcgccgaagtatcttgctcttttagcttagttactaattaaaagccgcccaatttaatttgttcaaaagcatgcagaaatatacaacatttgcatatgataaacgtgaaggaaatgttttatgctaagatttcgaactttcatagtaactttgtttttcagttgcaatataataataataataatagcagcaacaaccataaaagctctcacttttgtcccattcggaaaactcatcaaccaaaaaaagcattaacaattctaaattgcatggtgcgaaggtctctttcagtgtaattatatctattttttaagaattcagtgtaatgatttatttacggcatatgaaaccatgaaaatttaacatatacatgaaagactttttctaagataaaaacttcgtacgagcctttgggaaaaaaaatccttcaacacttgaggagtgtatatacccagacagatagaaaaagagggctaaaaattaaatttaatataaattaattatttatttagtaaaaaggtgtaaatgaggtaatatttgacaaaatggagcactcaaacacgctcaaaatagggcaggtttaaacccgccctattttggacgtgtttcaccagatgttgacacatgacagttatgcagacggggtacggtgtgatcgcaaacttcaaaaggtcataacttttgactgggatgtctgattgagacgaaaccggtggtctcgcactcaaaattgagagaaaaaaccctaggcaagtccctgtccaaaacttttttccaaaagaggcctctaagtgtctcaaaattgcgatttaatcgtcgaagctacaaaaaatttcatattttctaatttttatctattcaattagtgaattgcaatctattctttatttatctaattacttctcttaatttcaagcattctgacataaaatacgtcatcatcggacattgctacgagaaattacgattgttcaaagttatatgcatcgtcgatattatagtctaattttgttcaattttttaaattatttttgtgaccacaacagcatgattttttaggatttatgatttagggtttcgggtttaggtttatggtttaggatttaggatttagggtttatgtttaagggtttagtggtttagtgtttaggattaattaatccaaagccctaaaccactaaatccgaaaccattaaaaatctacaacaagaaccttgacgtacattgtttcaacttgtgccaagtccatcatcatatacacagagaagaatcaaaactgaaccatcaacagttaatcattaacccaaagccctaaacccctaacactaaaaccatcaacactaaccaattatccaaacacactatcccttagccctaaacacataaaccttatccccctaaaccattaacctaatccaacagttaatcattaacccaaagccctaaacccctaaaccgaacccactaaaccctaaacaattaaccaaatccaacagttaattaacccacaaccctaaacaaatgcataaattttcaaaattatactgtaaaatggacgatgcatataactttgaacaatcgtaatttctcataacaatgtctgatgatgacgtattttatgtcagaatgctcaaaattaagagaagtaattagataaataaagaatagattacaattcactaattgaatagataaaaaattagaaaacacgaaattttttgtagcttcgacgattaaatcgcaattttgaggcacttagaggcctcttttgggaaaattttttgggcaagttcacttcggaaattaattagggcttctcctctcaatttcgagcgcttggccaccgatttcgtctcaatcggacatcccagtcaaaagttatggccttccgaagtttacgatcacaccgtacccgtctgcatgtctgccacgtgtcaacatctggtgaaacacgtccaaaatagggagggattaaacccgccctattttgggcgtgtttgagtgtcccattttatcaaatattgtctcatttgtacctttttgttaaataaataattaatttatattaaatttaattttttggccgaaaaagagagataagtaattaataataatgatataatatgataaaaaaagtgagagaaaaaaaatagacgtgtcaatgatgtgtatgtactatttagattccaaaaattagaactgatttttttttttcggtcttcaaagaaataacaagttaacaactagaattcgagccttaatttaatggaattattacatattgtattgtcaaatttcattggacttcaaagcaagtgcataattttgctaaatactaaagaaaaacaagttgaaatttcttcaatctagcgtattccatcgcttgtctgtctcgcaaacgcatgaacagtgataagtaaaaatggtggtttaaccaaagactagataacctggcatatgaaaacttgtgcaaagtcacgaattccatcaattcaatctccaacgtgtcatctatatacaattattagttgggatagatatagataaaaccaagttctcaggagagagagagtagaatttggacggcatggaaatgtaaggttcaaagccttggccggaaccggacaatgcaacatggggtttgtatgattaattaatttctgatccattgcttttctgattaagtaacatcctaaggatatttgtgagactaagaactgagctatcaataaaaatatttatttgtgtgaaattttacaaaattaatttactttatgaaaactttaaattcaattgataaaatatattgataaaaaatgttacaaaaagttatataaattgttttttattttgtatatatccgagtttttttaattatgtgagtttatataaatttgatttactttataaaagtttcatattgacgagttaaaattatcctcaccaattctatactcgtcagatttagtagatgtactagaaaaggaacttcaatggtaaagttagtgtttgtttgatgtgtgtataatgtaaatagaatggaacttaccttcctttgacttatacatgatgacagtaacggagttggtaactgtcggcgagtttaggatgatgagtctagagtggtaatcaattggctaatgttgactacgtagttattattggatttatgtggaagcgatttaagaacctagtatattggtacgtgtacaatctaaaatagtaaaattacacgtgacagtatcataatggcctaacgacatgtggacagcccccatgtcagcattgccccctttataggcacttattcaacctccagaaggcagcccgaacatgtggtccgagctgactgtcaacacagcaacagaaacgcggacgtcgaccctcacctaggagcccggacattcgtgactttcactctacttgctcaacgtacacctcattgcaaggatattcaaataagcgcaatctccttatcttatcatatctcaagttatctattaattgttacttatctacaagtaacaatatatctacaaggtacacattatctctaattcaaattaagataactgcctgctattatctgtattattatcttttcaacagattatctctaaggaaaggcccaaggcccactccacgctataaatacaacactccaggtgcactctctccatctgaaactctccatcccctactcgacactgaatcccgaactcactctcaacttaccctacattctattcacacttttctctcttatacttggatgcattacccaagtctctcactctccattctttaggctgagtccacacttggccctctttacaaatttaatgttctgacttgagcgtcagagtgtttttcctttgttttgcaggtccctcctcggagcaaagcctaactctactctgacgtcatggagtttggagtccaccaaggccacatcaagcccacacgtggaatttccagattttgacaagaacagtatgtttatcaaattatcattgtttcataaacacataaggaatattacctctcggagtactgatctttgatgatctctcacgtcttataattcttatgtcactgcacaattgatctccttgtagtctattgatgtcaaaccttccagactatctctcaagggggaaagagataggatgtgggcactttctcactatcaggagatgaccttgtctcagcctctgtgactgtcctcccttttagagagggttaaatgtaatatatatgggtttctagaaaacctaagccttaggtgttaacggactttaggtttcttggactctttttacagactagatcctattgggctttagtgaaagagccaaaacccaacaaactacctgtgggtctcgtataatatagaagcccccaagctttgtgtctaattaagacaaaagagcttgattggtgttggtacataggataaaccatgtaaacaaatgaggatttggttccacttggtaacaagggaacaacatggctgacttgttttatttggctggtatgttgtgaaaaatgatttattgccaatatattttcaaaatagacatgtattgtctaactaacaagaagtaaattgatcaatcggtatgaccttggtcaaacaatgtgacgtgtgtgttcagacaagttgataaatttttagatagagaatcacactactaaaaaaaacattttttacatcggttaaaatgaccttttatatcggatgtacaactgatgttttatgcaggtgacatagaaagtctgaccttttacatcaaacttcaaccgatgttaaaagtcacattttaagatcaattcccatacaactgattttaaaagtaatctcaaatgtctagattggtttaaaagacctctttttatatcgatttttcttacaaccaatatataagttaaagcttttacatcagttatgtgattaactgattaaaaataccttttttagatcggttttaccttagaatcgatgtttcattaactaatctaaagagtttgcgttaatatatcggtgattgcacactccaacgtaaaaaatatactttctacatctgttttagtcataaccgatcttaaaagttttttttttttttaatttgagctgcatttttattcattttctagaaatagtttgcaaaatacaccataagttcttgattaagaggaaacaatttggggaatgacataagcacaaattaaatttattcatctctatcctttatttgaataccaaatcaagaaattttaaagttttggattattggagaaaatattggaagataataacaattttttgtttgcaataaggttgttatgggttattatcttcggttggttatttgtagctttatttcaaatttatagataagttgtttatattatattttcaaattgtgtaaccgcttgtctatttaatggcacaatcttgatcaatgcaaacagacaaaagttatcacaaatacaatttctaatatggtatcaaaagagttcgattctatatcttccgcatttactctaatatagtatggctgccactatttcaagtggtgctttgaaggtctctcaccaaagatctcctttctttcttgcactgtcagataatcctggcatggtgttaactattgtcaccttacgtggtcagactaattacgagaattaggcaaagcttcttaagaatgcactatgagctaagaacaaacttgacttcattactggtgttattcaaaagcctaacctagatatgtttgaagagctccatgcatgggatgtatgtcattctatgctaaatggttggattcataataatatagatcctcagctacaaccctcaatccagtgttttgagaatgccaaggacttgtgggacgacttgaaagattgtttctctgtagctaatattcttcgttagtaccatttgaaggtgagtttgactactattaaacaacaaggcatgactgtgaatgcttattacaccaagcttcgagccatctgggatgagctagatgctattcgcagttataacatgtgcacttgtggtgattcttgtacgtatgccaaaaaggtagcagctaaatgtgatagggatcatgtgtaccaatttctaatggggcttgatgatgccacatttgggacacttcgatcccagatccttaatagtaatgctaatgattttcctagtctcagtaagcttcatgccgtggtaatccaggaagaaactcataaaacaatagagcaaggagcaatttatcgtaccaaagtcgtggactttatggttcacacaaaatctcaacctattgattgtggggataagaaaccttgttttcattgtggtaaaacaaatcatgatgtttctcattgctgggtgttacatgggtatcttgagtggtataaaggaaatggacgtgacaagggccgccctaaaggcgtgaagggaatggccaatgctgctattaacattgctcttgttcctaactcaaaacacaatattcaagctagtctttcttctgatgtggctgaacgcttggatcgcttgctagctttggtgcaatcacagtcatccaatgataagcttctggtaatgtagctcattcttcttattggttagttgataatggagcttctcaacatatgactggtactctaagtcttcttcatcatgtgacaaatatcagtcctttagcagtgggcttgcccaatggttctattactcatgctattaaaaaaagatttgtttttcttgctcccaattttttttgttcatgatgtgttgtttgtccttaaccttcaatgcaacttaatttccgtggcctgtttgcttccgtctgataatcataaacggcttttgttcactaataagcagtgtgttttgtaggaccaatacctgacaacggagattggactgagtgatttgcgaggggatgtgtatgtatcaacccaggacaaggaatgcatttactatgcgtgttgatggcatgagggaattatggcatttacttcttggactcgattcacataaaactttgtctatgcttcttgatgtttttaaatttccttctagttcaataagtaatcatccttgtgatgtatgttgccgagcaaaacaaacttgctctcctttttcatcaagtttcaataacagtaaagcttcgtttgatttactgcattgtgatacatgggaaccatctagtacttgttcttctactggtgcacattattttctaacattggttgatgattatagtagggccacttggactatcttgcttgctgaaaaaaatgagatctttacacatattaagctatttttggctatgatacaaaatcagtttggcaaaatgatcaaggttttttgttcagataatggtacaaaatttaaaagtaacgaatgacaaatttatttggtgagttaggcatttctcatcaaacttcttgtttatactccatagcaaaatgaccgtgttgaacgaaaacaccatcacattttaaacatttgcgagagcgttgcatcttcaagcacacttgctatacagttttggggtgattgcattttgattgcttcttatttaatcaacctaccccatccaaattgcttaatggtgtcactccttatgaaaaattgcatggtgttgctctcgattcttcattactacgagtttttggatgtctttgttatacaactcttcaacctaaaccgaaggataagtttgcggcccattcaactaggtgtatatttgttgattatccttctaataaaaaaggctagaaattgtttgacttggaatcataaaaatattgtgtcctatgatgtctcctttcatgaattggtgttcccgtttgttgtttctactcctgcaaatgacaatgcaatttctccccgtgttccttgtactaattgataagcgccgtatttcagttaaaatcatgttttaaatgctggcacttatcttttgatttcattaactttgcttataaattttcttaaacctagtaaattagcaccttatacttgtgtttaaagtgttttggaagattaatccaatcatgatttgtattttgatagattctatggattttctaggcttccggatatcaaagcaagcaaagaatgcttatatagcaagtatgggaggtgcaacaagcatttcaggcccagaaatcgacatggcctaaagctttcttcaacattaagactttaactcgcccaggcgaccaaccatagtgtattttgctcgcccgagcgagctacaagttccaaaaagatatgttaagctggcccaggcgaccaaaacataaagaaaatggtggcctgggcaagtgaagctggcaggaggcaaaaacctataaataggccacgaaaatggagaggaaggcatgcattttgctttcttttcttgcctttgcttattctttagcttaggaatgttaaatattagtaagtaggtaggttaggaaagtgacagaagtgaggattagtgtggagactctgccggagagaagcggtgatagggcccttcagcaattctttccgtgaggaggttctcttcactatgagtagctagcttctctgaggttggatgtaatcttcttaaccctatatctcttttaatatttatgcatgaatcattctatttcttattggtaatttcattctgcacttaatgcttgattctacttgatcactagtatcatgaacttaaatcctaagtgagactgaaaagtaatcttagggtttgaactaaatgaatttactcattacattaagttgctaggaatagggcataacattctgattgcataaagcacgtgattataaatcttaatgctgggatatttacttaaatatgcgagggatggatattcggtagatattcttagaacttgaatgcgaggaatcgattcaaggtaacatagtgtgcatcaataagaatagacgatgatttatgtgtggtaatattaattgaatatagaatgttaagaatgatgaaatccaatcccactttctcacaaatatatttcattttcattaagtttagttattttacttgcaccaccaaatgaaattatgctcaacctacttgtacataactattgaactgattaattctatttggattaactgagtaaactcaagtccctgtggagacgattttataaattttgaaacttacaacgacaaatcagtgcgcttgccgcaaatacctaacactaatagctatgaggctctcactgtggatgatgtccctattgttccattgaaaattttaactcctgacatcgaggatgcacctgatccccatgtgcctggtccaatcattgatgataaggggagttcggctcctgcttctccacgtgagtctgtccctggtccttcctcatctcttgaatcagaaccttcaaaatgcacaagacaacatcatgcttacttgaaagactatgaaaatggtcttcctggtacacatacaccttcacgctcttcctccaattcaatttctattttaggtacttgttctctttatccacttgctaattttgtgaccaactcttgtttttcctccaagcaccaatcgtttttggcaacaatagatgcttcttttgagtcacgatcttggcgtgttgctttgtttgattctcgatgggttgatgcaatgcgtaaggagattcatgctttggaagataataacacttggcgtttggttgatcttccgcctggcaagcgagcattaccatctcaattggttttccgtattaaatatcatgcaaatggttccattgaacgctacaaagctaggttggttattggaggaaatcgacaaattgagggagaggattttcatgagacatttgctctagttgcaaaaatggtaagtgttcgtacttttcttgttgtggcatttgcgaaacattggcatcttcatcaacttgatgtcaataacgcctttctacatggtcatcttgatgaggaggtttacatgaaattacctactagatttagtgggggtttaacatccaaggtgtgtcgtttacagaagtctttgtatggcctctgtcaatcttcatgcaactggtttgccaagcttacttcttctctccttcattatggttttgcgcaatccaaagttgactacaccttattcactttgactcacgacaatatttttctagcattactagtatatgttgatgatattgtgcttgctcgtaatgatgattctaagtgtgctaaggttaaatcgtatttggattcttgttttaaaattaaggatttgggtgctttgaagtttcttttaggtattgaggttgctcaaaataattctggtctggttctttctcaacggaaatttgctttggatattttagttgaagctggtattgattcctctaaaccaactcccttccctattgagtcaaaccatcgcctggctcttagtataagtcctgattttgttgatcctggcaggtatcgtaggcttattggtcatttggtttatcttactatcactcacctagatttaagctatgttgttcacactttgtctcaatttatgcaagcaccaaaacaagaacattttgaggttgtgctttgggttttgcgctatgttaaggctaatccaggtcaaggtttgtttctttctgctaattgtgatcttcaagttcatgctttttgtgattcttattgggctacttgtcctttaacttgatgttcaattactggttattttattatgttgggtcagtctcctatctcttggaatccaagaagcaggttatagtttctcgttcatctaccgaggctgagtacatatcaacggatactacaactgcagaattattatgcctaaaattgttccttgcttctctaggtattcatcacacatggcctatgttattaagttgttataaccaagctgctcttcagattgcatttgtgatgttttctcattcaatttatgcgcatattaatttattttgagaaatatcaataaagtttggacctagaatgaacattgtgtttattcattaagttgtatgggttaagggatataatgcattgtaatacatggaaggtaatactcattattaagaggacttatcgtcatgattcatgcattttatttcttgttatgtaaattaagggacatgtcgaccaagtgggagaatgttgatttttattttgaaattacaaaatatatgtaaccaacctgatagtggtcaacaataattcagaaaactaaccactaccacatcccctatttttttggcaacgttaacgtctcttcctttaatacaccatagctgaccctttgatgacaagaggtggcaaaagaaccaaaagggtgtttttttaaaaaatatttaccgataaggtgcgttttcaaaattatttccaaatctggtgcaggggggcctatatttacaaatctggtgcactgcaacatgcctggatcaggcatgttgcagtgcaccagattctataaataggccccccctcccatttcctcacttgcaccatctctctagaattgctctgtcttctctctagaatttttctgtggtcttttgtacagcgaagctctgctgaagtgtgaagttgttaagataaaatcttgcgaataagtaagcgtctggtctttatttgcctctgttataatatttgtagtcatgttgttatgatttacttatttatattgttagtgatgtacttgtgatttagcaaaagatgttaggttacgatatataatagaaaaatgttagtatgacattaatttggtaatgacaaaaaaattaggtagatacaaaattgtttaggtgtttgggactgtagtttttggataaaatgattagcattttgaatttagggttaatgtgtggttattgtataagagttaaataattaaggtttagggttcaatggggtaggtatgtgatgtttgggctagggttggggaatggtttggttgcatggtttaacatggattttttattttttcgtgcatgaagttacagtaacatggctgatttggatggagctgattcgccccgctctgaatcggatcatgaggctgagccgatggatctgacgtcttatgttgttcctaccccgtacaactggggcgctttgcgtaggcgtattcagcgcacgcacgtctcacaagttgtgtggaatgggggcgtggatcctcgactattgaagactcgacgtggcaagctgtcggccgggccagcatatgacaacattcctgaggtcgttggtgatatgctgcgtgacgctggctttcttcatgtcgcacgtatgcgacatattcaggtatgcaacagttgatatcagtaatcaaatttgatttaacgataactatacttgtcaattgattaatgatattgttttagattgatgctggcctgattagtgctctggtcgagcgatggaggccagagacgcatacattccacatgccacagggtgagatgactatcaccttacaagatgtggctggaatcttgggattgcccacggtgggcaaagccgtcaccggagtgactttgtccgactgggcgggggtcattgaggacattttcgatgaagcacctgatgaagacaccgagctgattggtggatctctgcgattgacctacttcgatagacatttcggctattggggtcagttggacaaggattttgttaatgtcacccggtttgcaaaggcacacatcgcctgccttcttggtgcatggctgctgtgcgatagatctggaggtagcatgatcgcatcacgctattttctgttgttggaaggggacttctcagagatcggagaatacagttgggcgtcagccgtccttgcacatttgtttagacagatgtgcgagtgtacagatccatcgaagaaggacatcggtggctgtcatatgctgctgcaggcgtgggcgtggctgagattcccaccaattgctccatctattcctcagcgtacggacccacatgcacattttggacatcggtatgtgtgactacatgttgaattcataacaattttaacatttaagtcctacaagggttaacgtttgttgttttgtctacaggtttaacgggctacgccggcttaccccgcacgagttggtgtactacaggacggctttcgaagccgtcactcgagataacgtatgtgtgctgattgcttactaattggaagttagcatttgtggtttatgtcatcacataaaagaaggttattttttttttgtgcaggtggtctgggaaccatatgggggttacgattttcttggtgcatccgaccatgagcggttgttgtggatggcatcgacgcctatcatttgcttccacacagttgaagctgcccagcccgatagatgcatgcggcagtttggtagggatcagccgatcccatgtcctgccatgaagctgaagggtgtgcacgacttttcacttcgtggaaaacgagaagaaaactgggtgcgtaagctcaaaccgtttcgcaaacgctggcgggaaagggagcagtacatcgacctcccccccccaatccaaggccacacgtctctaaaccatgaatacatggtatggtacagagaaaatgggaagcgatttatcaccaaggatggtgcgaagatgggtcgtagtgtaagtttagttttcattaatatttttttatttacattaattatcataattgacatacttcacactggtgtttctatatttgaaattcaatttataggtcgacgggatagagatgctctacttcgcgacacttccgcagaatatggcaacgttcgacttcaattgggcaaatcaggagttgggtcgcctaatggctgtcttcgcacaacatggttatcaggaagaacaagggtttgctgcatcctactcttcagggtttgaaatgaacagtcatcaggaactcgcattggaattggagttgcacattggaaagaaacccctgtttcgtcgtggttcgttgatccattcggataaatgaacgctaattttgaattaccaatattctgactgctggtttctcctaagaatgccatcgtctgcacattgaattttgagtgccgagcatgcgacttatataggcctcaatggcgccctatataggcttcttaagtcatgccgaagttgggcgtgttcagccacgccgaagtcgggcgtgtttagtcacgccgaagttgagcgtgtttagtcacgccgaagttggccgtgttcagtcacgccgaagttggtcgtgttgaatgacgcgtatttgttatgctgttcaacacgtccaatttcattcattgaatgtcggcctatttgtcagaccttgtttgacagcgtgcattgaaatccatatgtgttacatcaaattcatacactatgacacatccaaaatatgaaacaaacaacattactatgaaaacgtcataaaaagttcatatgaactgagcataacgtacaacaaaaacatacaaccactaaaaaaatcatgcagcccccctccccgactaggacaaactctccggttgtgcccaacttgcttacaaatgccacacctcatacgtctctaggatgtttcgacttcgtccatctcgttgcgtattctggtggacctgggacgacctttggcccgcagcatcgacctgtcaggtatgatgactggaccttcgctcggtggaatggcccgttcattacctattggctgccatggcactgaatatgcctgcaccaatttgcttacaaggaagacgtcgtccacgtattcaaaaggattctggcgcacatgtaaagcagcagctgcggcatgactgcatggatatttgaaagccttgaacttcccacactggcaaacccgatcggcaagggacactgaatatgacttgtcaggcccatcatccacctggaataacgttcgagcaacgttatatctgcgtacatggtgtcctaaagtcagtgtttgattacgcctcattgcttcaaccacatttttacaatatcgttgtgaattttgaagctgttcggcggccgcctcgcctctgtctacgaaatattgaaccattcgggtgtacgtgtgtttgacaagagcggtgatgggcatgttcctgactcccttgagcactctgttcactgattcagccaaatttgttgtcatgtggctgtatcttgtcccgtctacatcatatgcacgtgaccatttctccttggggatggaatcgatccactcggcaacctatggactggactcgcgaaatcgcgcaaatccgatgtcaaactctaccgtagagggtgtataacctgcaacaccaaaaaatacatcaacataagtttgtttacaaatttttctaaaccaaaattatgataaatttcaacgttttgactcacctaaatgcatgagggccctctttagtcttgcatccttgaatctttgattaaaattattgacaatgtgacgcaggcaaaacacatgatgcgcaaaaggtggttgccaaccaggatgactttgaacaacagatataatgcttcggtgccaatctgaaatgaggcatatattttgcatgcgagtaacgtggaagcgaatgttagaaaggaagtaattccaagcttccaacgtctccccatccacaacggcaaatgccaaaggaacacattcattattcccatcctgtgttatggcaaccaacaattttcctttatacttcccatctaaatgagtcccatccacttgaatgatgggcttgcaatggttaaatgcctcacaacactgtccaaatgtccaaaaaatgcgatgaaacacgcgcttttcccgtatcaatcgatttgcaacgaagtaatcattcgtctgaatatcaaaataagaacctggtgcaaaacgaagcatgtagttacaccacctgggcaagaatgcataagattctacccagtctccgtaaaccattgccattgctttctgcttcgcataccaggcctttcgataagaaactttaaatctgaatgtgttggtaatcctttcctgaaccaatgagattgacactgatggttcctccttaatcattcctaaaaaaacaatttaacattacatcaacaacatgctttgcaaacaaatatgtcttcaaaatgcatcacagtaaattaaaacataccaacgactagtgaagcaattacgtcagcatcaagctgtctgtgaccctgtgaaatatgatcattcaagcaattgtgttttccaccccattttgaaacgacccatttctcacggaaaactggtttaataaccctaaccctccaagggcaaccatcagtatgcgcaacacacttcatggaaaacttgtcgggcctgctctctaccacagttgcctcttgatgctccttcatcaagttatgcttcactgctaattgtgcgtcctttttcgagtcaaattcttgtttgacaaacacatcatcccctagttgccacagaccttgcactgatcctgaacccgaagcagaaccagaaccgctaaaagagtcttgttcgggtgggtaactccaatcaatatatgtataatgaggaattccttgccagaaaggaatcgcctcagcagttgcacattgaacgtcagtttaattaacgatatcagctacaaagaactagacaaccataacccgtcaactgaataccgaaaccctaaaccccaatgaaaccctaaacctcaacagaaagacctagacccaaaccaaaccctaaacccaacacaacgcccacaaacccaaccaaaccatctaacccatacacattttcgggtacacagcatacacttatttaacctaacaaaataacatcatcaaatggacattaaaaagcatatacataaacaatataaaacaaattaaatgaaaaaacattctaattcacatggtcagctaatttaccttgttctggttgactcgaaccaccctccgcatgatgacaagtttcagatggcccgacattaacatcttcgtgatgcacaccagcatcctcatcctcatccgacgcactagcatcctcctgaagaagtcgatcttccattacgatattttcatcatcgtcatcctcttcatcctcatccatgacccaagttgggtcatgtgaatcctcctgagacacgttcacctctcccccaacaaatggtgcccctccggcagcatacgatgcacctccagcagcatacgatggccctccagcagcgtatgatgatctacgatgtggaactgcctggatgggtaaaacaacatcctcaacttcggtaatatccacgtacaactccagaaaatctgtccttccttgcttgcaaaattcatctagtaccaactccacgtcttcatcatccattatttgaaaccccatgaacttctcgtgttgccataatcttcccgtcagtaaagtgattgactggttgctattcagacataatttttgccgtatcttttcatgcaattcagttagggttgacgtacgtctcacagaggttcctcgtgtgtccccttcaaaaatgacactctgttggccttgatattttcttccattccaatataagacaatgcgaactgaatctccacttgaactcatgtttctcgtcactcacaacaccttcaaaaatctcaaaaaaaaaattaaatacaccagaatgatggcagtttagcagagaaacaaaacactaaaagccaacacacgaacgaactgggaagcggggggccttatttatagaatctgaacaagattttatctgaacacttcacacttcagcagagattcgctgcacaaaaggccatagaaaaattctagagagaagacagagcaattctagagagatggtgcaagtgaggaaatgggaggggggcctatttataggaatctggtgcactgcaacatgcctggatcaggcatgttgcagtgcaccagatttgtaaatataggcccccctgcaccagatttggaaataattttgaaaacgcaccttatcggtaaatattttttttaaaaaaaacccttttggttcttttgccggcaagaggtctataaataagtgtgtctacagtcttcttaggtccctaaactcattctatatacatcaacatatacaccatctagtactttagaatcagagtttagaagactcaagagagatcttcagtgcaatccaaagactcaaaattgtgaacaatgacggaagatatttataatcctattttattccgcatttgatctaattgtttgctatttaaattttgaacatgattagatcattaatatttcgaactttcatatttcgaactttcattgataacatcttattcttggtagagattttaaacaaacttctactagcattatacaccggggcattgataatgctttagcgtaatgaaagaataactatttatgaaaatgataataacaatgtctctaagacatattccattcccacacagatctggaaacatattccatattaattacttggtgcattggcaagaggaaggggatgaggcagaacaaaggtacataaactggattaggaaaatgtacaaatatatggaaccttatgtttcaaagtctcctagagctgcatatctgaagtatagagaccttgacactgaagtaaataataacaatggctacacaagctacaaccaagccagcatttggggtcttaagtatttcaagaacaacttcaatagattggcaagagtgaagaccatggttaatcctctaaacttctttagaaacgaatagagcatacctcctcttaagtcgaaggactcaacatgcaagtaaaaatccttggagttgtaaatgtctttataaaataattaagctcctttgttattttacttttatgcagtatatcaaatgcagcattcattaatgagtaattatatttgcacattcgaattaatgagctatggacacgtactaatcatttttttatttctttcttttcgcatcataccattgatatcatatttacattgctctttattatctttttatttatttatttctgtttgggtgtctatgcccatgaatcattttccatttatcaatataacttaattagtattatgtgtaaatatgaaattatttagatgacttatgttgactattgctcaattatgtttgcatataagatattcatatctaagaaaaagagagagagagtttttttttctcaaaaaaatgtagatgagatgtgacactcgaaagtacaaattttcttatatatgtacaccttcgttgagaatgaagcaagcaccaagggatcttgtctcgtgtaaccaagggagtataaactaaagccctttgctttcctcgtcaccaggggagcaaaccgcaagcactacctgagcaagactctgtttggcatcatattctcctctcaaataaactaggatcctgttgtggaccaacccaaatcaacacgatagaagcatcaacctcacataacaacaacgaaaataggaacattaacaaagatagcatcaacccaccataaaccccaatccctaacttaaaacgcagcacacaaacaagtgtgttccggaaacgccataataccgaagtaaaagataagaatctaactaatctaactaatctatccaaatatccaatattcctttatcttatctataaggtacgagataacttctatttaagtgaagataattctttattatcattcgttattatcttttcaatagtttatctataagctatggcccaaagcccataaatcactatataaatacggcaccccaggtaatcagaaggtacacttctctagctctctcttttcaatacacactctgcacacacctcacgtccagattgtggtgtttctcccagcaagtgtgattttcttccctgaggtgttctttcaccatagacatcttcaggagagagagagtttgatctcatatcaagatttccagcaactcagttggaaacacctccattcttcttgaacggaacattggcgccgtctgtgggaaacgctaaagtttgattcccatcaatcatggttaacacaagaagccaccaagtcgacggaagagacggagtaagaagaaatctagaaaatgtgatgatagaagacgcggtttctcacaccgcctcatatccagccataccaacaccacggcagcccgccgccaatccgttatttgacggcgaagaagcaccagacacgacgcaggtgatccacaacgccctgaattcaattctgaccagaattgaaaatttggagagacggtacgagcttcaacgacaagaggatattcagactatatttgcccagttcgacgaaagaaggcaacagtatcacgaatcgcaccacatgtcggtacgtcggcaagaagaacctcggcaggaggtacctccgcgagggaaccctatcccagtcacgggacaggagaacccagattcggtcgacccctccagaccgataccccgaactagagaaattcatgtctcgcaggctggcatcccggccccggctctggaagctaagggaaatggggaggaggcagttttaatcacaaaggaaggaacttaccagagaaaatatcgccgaggacaacagaataatagtccgttcgttgacgctattgtaaacgcacaattcctgaaggattttgatggattgtttctctcgaaatatgatggaagtcaagatccccaggtgcatctagatgaatttgatatgcaaatgtgtgtccggggtatagatgagccgatgatatcccggatcttcgtcactacgctaaccggagcagcgcagacctggttccacactttaccgcccagatcgattcggcatttcgaagacctcggccacaggtttttattaaattttgcaactagtaaaaagcagccgaagtccgagttcgccctaggaataatacgccaacaatcaggagaaaccctgcaaagttacctcgatcgatttaaggaagcagctttgcaagtccagggattggaagaaagggtgcacgttcatctcatatctactgggctcaacggatcgtcccgcctggccaaatccatctataaagatcccgtgaagtccctcttggaattcaggatgcgctctaagaaatacttggagctggaacaaatggagatcgccaattcagggcataaggaggacaggaggaaaccatcgccgcagaaaaaccggcagcaaggaagaatacataacggccgaaatcatccaaacactcatcaagggcgacctccgaggaactttctggatatcggaaacaggcctagacacgaacccaaatatgacaggtatgctccgttgaacacttcccagacccagatctggagggaagtagcgtcaacggagatgaaaaaagttgaacgacctcggctggcattcagtaaagcaggactggatcgtacccggttctgtgaattccacaacggaccgggacatacgacagagcaatgttgggatctccgagacgccatagaaaagttcgttcgtgaagggaaattgcggcaatatgttatcaaaacacagggacaacgaaataaaagaacaaaccaagatagtgaccgaagccgagataagaagaaaaacaagaaggacgacgaattcccggagctcgagttcgaatgtaacgtgatctcgggatctatgggtggcgggggagacacggctaatcaacgaaagagatatctcaaagaaataatgacgataaaaacccaaccgagcttcaagaggaatgcaaagaaagatcccctcccactaatatacttcactgaggaggacatgacaggagtagtacctggccatgaagacggtctcgtcataacggggatcgtggctaacttccgagtcaaaaggatattcgtggacaacagtagttcggccgatatcattaaccttgaagcattcaagaagatgaatctaaaagaagaggagttgaggccatgccagaccatgttgtatggtcttaatggagaaggcaccggcctaaaaggtgtcattgatttgcaactcactctgggaactaaagaaggtttcaggtcagaaaaagtcactttcactgtggctgaatttccgtccccatataacatcatcctggggaggccaactcttcacaagtgggacataataatgtctacaaaacaccagaaaatgaagatgatagggcacctcggccaggtcatcaccatatgcggagaccagaaagaatccagacagtgctactacaatactgtcaaagaaagcaatgggaatcataagtctccacctcggataaagaagggggatccagcagagcacgaggttggaaagtcgtcacctcgacaacctattaacttggtggaattagacgtaagagatgacgagtggaggccggaaccagtggacgaagtagaggaagtccaaattggggattcacctgataaagtcgcaaaaattggcaagcaaaatgatcccgaaacaaaaagaagactgctagaatgcatagaaaagaaccaggacgtttttgcttggagagtgatcgcggtcgtacgcaaccaaattaatttgattttaaaatgtagtactaggaaagtgactcctaggtcgtctctcaaggatcaattgtcaatgtttaagggattgaaaacgtgttggggggatttttggcagaatgcgaaaactaaattaaacagaaataataattaattgcagtgattaaaaacaagtcagacccttagaacagattgcgcctctaatatccttggttcacgaaagataaattgtcctactcaattctcatcagtccagattaatcaactaagcgaagattaacctaaaacgtcattacacgaattaagcaaacgtgaacctcgttagggcaaactctcagaattaagcaaactgagaatactgaatcaatcaatatcaaaatcattaagcatgactctaattcgaaaaatacagaacagaaacccaaacaaggaagaacaaacagaaaacgaattagaagaacaagaaccttcattaaaggtctgcaatctgtcctagggtccaaccctaggtttagccttccattaattcgaaattaacaacagaaacataaattgaattgaaacgaaacattaaacgaaattaagaacagaaacgaaattaagaacaaaaacaaaattaagaacagaaacgaaattgaaattgagaagatgaagcagaaagcgaaaacaatactgaaactgaagcagaaaacgaaaatattaaaactaaaggaaaactgaactaaaattgtattgtaggctgcatgttcttgtctgtctgttgtgtgttgtgttttgtgtgggcacagaaccctcaatatatagtaactgcctaacctaaaagaatggaccttttcctaacaattttgacccaaaatcactaaagataagataagataaaataaaataaaaacgaaatccatattctgatatggaaaatattaagcataaataaaaacgaaatctataatttgatatgggaaatattaagctgatgctgacgtggcgcactaatcttcagtccataaattaattccaagcccaattaattattaatctgccctgaaaaatcaaattagaaataattaacttaaaataatccaaattaattaaaattcgaattattggtctaattaaatcctaaatgagaaacaatgcaaaatataaacaattaagcacaagttagggattaaaatgagtacagaaagatgagtaaatagtgataaatagtgactcatcaaaaccccccatacttagccttttgcactcctgggcaaaatcaaaaagtagagtagagcaaggaaaaattctaaagacattaaagaaagtgacacatcgtaaaataaacagttctgcacaatcctcaatgaaaattgggaaaagataaaggaattgataatttccaacacacaaagagtcagagagactacacacttatgaaattcatccaagcattcaaaacttagcaaaacaatcaatccgttcaagaggtgaattaaaagcaacagaacctcactagatgcactgtatcacacactgtatctctcaagtgtttaggcaactgtatactctcaaaacactcatgaaaacaagcaacagatagacttggcaagcctctataatcaacacccaataaacatgcacataaggatcaaaaggtcttttcagggttgtaatgtggccaaggaaatgggtaggataaaatatgagataagtagctgcaaaccagagggactagaggagcaatggggaataagtaagaagtaagcacaaaaacaaacccaaaaatctctaatcagcctctaacaccattccttttcctttgcttcaaacacaacagcttttcttcaatttattatttttccttcatttctatattttttttctctttttcttttcttttcttttctttctttctctttttttttttttttaaatatggtactgactgatatatgtatagaaacatgaagaataagctgaacatcagagtaaaccaacaggccagagatatcatccaaaacaatatatacatgcaccccccttacttattcccaaaacaattccaaagctccaaaattccctaaggttaaggtaatcattgtttttcacttaaggcttgtaatgagcttcaaacaaaagaaaggaaattaggctcaacagggttgtcaaaggaattaaattcagggtaagcttatttggccagaggcttatcagaacaaaaatgccttaatcatatccaaacatgcatgagaaccaagaaatatcaaacagagtcaagacaaggcaactgtgcaagcaatcaagaggtatagcacacatgaaagaacagatagtggctcaaatcctcacacagggtatatctgtcacagttaaatcaacccttcaaacttcataatcatctttccaagtaaagaaaaacatggatttcaaatcatacagtatgaagcaactcttatctaagcatgaagtaggtgtcaacacttattcaaaacccagaaatcaaaaagaaacatgcaaaactatttgcaaaaataagacttaaaactaacaaaacaagacaataaaactaacagaacaaaacaaaacaaaacaaaactaacaaacaaaacaaaacaaaaataacagtctctccccccccacacttaaaattacacattgtcctcaatgtggcacaaataaaagttcagaacaatcagaataatgcaataaatatggacaagtgtgataaaaataaaggaggagaaagaaaagaaaattctaaggtgtagtggaagatggaagggaggtagggtcaatcagagatatttcttccacaactgcatctagcaaagaaggattgctgaggaatggcttaaggcggtgtccattggtcttgaagctctttcctgtggactcactttgtatttcaactgtaccataaggataaacattagtaacaacaaaaggtccaatccactttgaccgtaacttaccacccatgagtccgagcctagaattgtacaagagaactttttggccaacctcgaagtctttcctaactatcaggctatcatgaaacttcttggtcttctctttatagaattttgagttctcatatgcttcaaggcggatctcatccagttcacttagttgcagcttcctttcttcaccagcttgatccatggaaaagttgcaagtcttcacagcccaataggctcgatgctcaatctcaacaggcagatgacatgccttaccaaagacaactcgataaggagacattcctatgggtgctttgtaggcagtcctatgagcccaaagagcatcgtccagtcttatactccaatcctttctgttgggctggacaattttctctaagatcctcttaatttctcgatttgaaatttcagcttgcccattggtttggggatggtatggtgtagagattcgatgcacaaccccatatttcttgagcaaagcttgcatggatctgttacaaaaatgggtgccttgatcgctaatgatggctctgggtatgccaaacctgcaaaatatgttagaacgaacaaaatctacaacaacccgagcgtcattagtcctagtagctctagcttctacccatttcgaaacataatcaacagctaataaaatgtatgaaaaaccaaaagaaacaggaaagggacccatgaaatcaataccccagacatcaaacacctcacagaatagcataggttgttgaggcatctgttgtctccatgtaagggatcctcctgctctctgacactgctcacaagtgctacaggtctttgccgcatctttgaagatggtgggccagtataaaccacaaccaagaaccttgcgagctgtcctctgtataccaagatggccacctggtgcggatgaatgacaaaactgcaagaccgaatcaatctcatgatctggtatgcatctcctgatcacctggtcactgcataacttccacaaataggggtcatcccaaatataatgcttagcattactcttaagtttatccttttgagctcgtgatgccaagggaggaaaaacagaagcaactaaataatttacaatattagcaaaccaaggggtgggattagaaacagaaaaaacagtagaaacacttaaaagattttcatcaggaaaattatcctggataggcaacatctcatgactattctcagctccttcaattctgttgagatggtctgctaccaaattctgagctccactcctatcacggatatccaaatcaaattcttggagcaagagcatccatctgatcagtctaggcttggagtcagtctttttcaacagatactttagagctgcatggtcagtataaacaataacaggagaaccaagcaaatatgatctaaatttatcaagagcaaacacaatggcaagaagctctttctcagttgtggtgtagtttgcttgggcagcatccaaagtcctggaagcataatagatcactctaggcagcttatcaactttctgtgccaggacaactcccaatgcataatttgatgcatcacacattaattcaaatgggactgtccagtcaggtgcctggaggataggagtagtggtcaacgcttccttaaggtgatcaaacgccttcttacagctatcatcaaaattaaattcgacatctttttgcagcagattagatagcggaagggccttcttgctgaaatctctgataaagcgcctgtagaaacctgcatggccaaggaaagaacgaacctctcgctcgcaagaggggtaaggcagatgtgaaataacagatacctttgcaggatctacctctatgccctgactagaaatgacatgccctaaaactattccctgttctaccatgaaatggcatttttcaaaatttaagacaaggttagtttcaatgcatctattcagcaccttatccagactgtctaaacacatgtcaaaagaggatccatatacagtaaaatcgtccataaacacctctatgcaattttcaagaaaatcagagaatatgctaagcatgcaccgctggaaggtaccaggggcattacacaggccaaaaggcatcctcctataggcaaaagtgccaaaggggtaggtgaatgtggtcttctcctgatcctcaggagcaatatggatttgaaaataaccagaaaaaccatcaagaaaacaataatgagatttacctgccagacgctcaagcatctggtcaatgaatggcagcggaaaatgatctttccgtgttgcttggtttagccttcggtaatcaatgcagactctccaactgttttgtactctggttgggataagctcatccttgtcattctttacaacagtgaggcctgtcttctttggaactacctggactggactcacccactgactatcagagataggataaatgatcccagcttgaagaagcttggtcacctccttcttcactacatccaaaatcatcgggttgagtctcctttgtggttgtctcacgggtttagctccatcctccaatgatattctatgcatgcaagtggatgggctaataccggatatatctgccagggtccatccgatggctttcttacgctttttcagaacttgcaacagtttatcctcttgatcagcatcaagggaagtggaaatgatcactggcaacctcttatcattatccaagtaggcatacttgaggttttccggtaaaggttttaattctggaatgggattgggctgatcagaagaaggaaccaaagatggaagaaggatgggttccacagcttgtacctcaacctgcaagtcagattcttgtgtacttcctaaaaaatggttattgcattctgactctaacaagttattatccaggggtacatcacccaatacatcagaatcaattccagaatagacatcaaaattggacacatgttcagattgaaattcaaaactagactcattgtcagattcatactcattcatgcatgcaagagaagtgtaaagatcagacagaaaacattgttttgtagcatgggaagaatacagatcagaaacatactcatgaacaacatcatcaagaatctcagcacgaaagacagaatgattttcagatggatgtttcatggcatcaagaatgttaaaatgaacaacaatatcaccaaattccatagtcaatgtaccagcatacacatcaatcttagttcgggctgttttcataaatggcctacctaaaatgagggggacagaaccatgggagaatccctcctccatatcaagcacatagaaatcagcaggaaaaatcaattcaccaaccctaactaagacatcctcaataaaacctgtagggtaggcaacactcctatttgctaactgtatcactacacccgtaggttgcaagggaccaagggacatagatttaaaaatggacagaggcataacatttatggaggcacctaagtcaagcatagctttatcaaatttattactaccaataatacagggtatgctaaaagtacctgggtcctcacatttttcaggcatatttggaacagaattacctgtcatagaagaaacatttctgcccatgctgactctctcaattccagtcatcttcctcttcctcttgttagtgcacaactccttcaagaattttgcatacttcggaatgtgcttgatggcattaagcagaggtatattgacttctactttcttgaaaatctccaatatctccttatccacttcttccatctttttgtttggaattgatctaggaggaaatggaagagggatggaagactgctgctgcacatcaaattgctcatcactttgctcatcactggtgctggaagaaggttcatctgcacgagtttgttcatcactttgctcatgtgttggtacaggtgcaggggtaggaactggtatggatggaggtggggttactgcagtaggtatgtcaatctgttttcccgacctcaatgtgatggcactcacatttttcggattctgcacagtctgagagggtagtctatctgaattttgtgactgtgcatgattgagttgagtggccatctgccccatctggttagtcagactctggatggaagctctggtctcttgctggaattgcaagttttgcaaggtcatctgtctcacaagctcctccaatgaaggttcagaggtagaaggttgaggtgctggtggaacaggtacatcttgttgttgcctctggtactgctgttggactggtggaggtacataaggtctagttgggccagcagaaccttgaaatggtggtactggaggctgctgattttggttctttgaccatctgagatttggatgattcctccaccctggattatatctgttactagacagatcataattctgctgctgttgttgaggcctattattataaatatttgcagaataagcttgtggagcatcagggccaacatgttgctgcagagagggacatgcatcagtataatgatcattggaagtgcaaacaccacaaactctggcaacaggggcaggcttttggttaacagcaagttgagtcactaaattcaccaaagcatctaatttgccctctaatttcgtagctgcagatgaagaagaactagaatgcgcagctacatcatgaactccacggatagcaatagcatcattccttgtactgaactgctgggagttagaagccatcttttctatcaagtgcctggcttctgcaggggtcatatcaccaagtgctccaccactggcagcatcaatcatactcctctccatgctattaagtccttcataaaaatattggagaaggagttgttcagaaatctgatggtgtggacaacttgcacataactttttaaatctctcccagtactcatataagctttctccaccaagctacctgattccagatatatcttttctaatagctgtggtcctagacgcagggaaaaatttttccagaaacattctcttaaggtcatcccaaccagtgatggatctaggagtaaggtagtatagccaatccttggccactcccttcaatgaatgtggaaatgcctttaggaaaatgtggtcttcatggacatctggaggtttcattgttgaacagactatatggaattccttcagatgcttatgtggacactctcctgcaagaccatgaaacttgggcagcaaatgtattagtccagttttgagaacatatgggacatcctcatcaggatactgaatgcacaaactttcataggtaaattcaggtgcagccagctccctaagagtcctctcacgaggtggaggttgagccatattattctcagtattaaaataatgagcagaatcggaaccagagatattatgcacaaaatgctcaggaacagaatactcagaattcaagctaatattatctaaggctacagactctaaggaaaattgcttagaatgcctaattaatctatggtaggtcctatctatctcaggatcaaagggttgcaagtctcctggattgcctctagtcatgcactatatgcagcatatcaagcaattggcagataagcacaaagagaggtaaaactagacctatactcaaacaaagtccaaatgagctaaaattttgtgagcaacatcctaaaatcatgaaaagacatcacaccaaaattcaaaggataactaaataaaacagattaaggaaatatagaaaaataggaaaataaaacttcaaaaataaaaataaaatagaaaacggcctctttttgaaaatccaacggtggccagcaagcatagcatgctgggttggctagatcttttttttctaccccaaaagcatatataacacgtcagattctgacggtcggatcaaaagttatggtagtttgaagttttcacaaaaattggttttccaaatttttgtatctcagaatctggagtactttaagtgcttttggtatttttccacacaaatataacctaaaagaagttaccacacaaaaattcacgaaaaaataacaagtctagctatcaaaacaaaaaatcacaagtaattcagaaaaaataggtattgttcactctattcagtgctgttgcgtcgcgtctcctggtatgcgcagaatgcttgctgagggcactaaattggtcctgcaaaattgatcaacgaaccaaatatgcaagaaacaaaaatctaaagcacaattataacaagccaaagtgatataggtaacaggtaccaattcgaaattttttttttatttttttaaataataacagaacacaaaacaaaaacacagaacccttaaacagaactaatgatccccggcaacggcgccaaaatttgatcgcggccgtacgcaaccaaattaatttgattttaaaatgtagtactaggaaagtgactcctaggtcgtctctcaaggatcaattgtcaatgtttaagggattgaaaacgtgttggggggatttttggcagaatgcgaaaactaaattaaacagaaataataattaattgcagtgattaaaaacaagtcagacccttagaacagattgcgcccctaatatccttggttcacgaaagataaattgtcctactcaattctcatcagtccagattaatcaactaagcgaaaattaacctaaaacgtcattacacgaattaagcaaacgtgaacctcgttaggacaaactctcagaattaagcaaactgagaatactgaatcaatcaatatcaaaatcattaagcatgactctaattcgaaaaatacagaacaaaaacccaaacaaggaagaacaagcagaaaacgaattagaagaacaagaaccttcattaaaggtctgcaatctgtcctagggtccaaccctaggtttagccttccattaattcgaaattaacaacagaaacataaattgaattgaaacgaaacattaaacgaaattaagaacagaaacgaaattaagaacaaaaacaaaattaagaacggaaacgaaattgaaattgagaagatgaagcagaaagcgaaaacaatactgaaactgaagcagaaaacgaaaatattaaaactaaaggaaaactgaactaaaattgtattgtaggctgtatgttcttgtctgtctgttgtgtgttgtgttttgtgtgggcacagaaccctcaatatatagtaactgcctaacctaaaagaatggaccttttcctaacaattttgacccaaaatcactaaagataagataagataaaataaaataaaaacgaaatccatattctgatatggaaaatattaagcataaataaaaacgaaatctataatttgatatgggaaatattaagctgatgctgacgtggcgcactaatcttcagtccataaattaattccaagcccaattaattattaatctgccctgaaaaatcaaattagaaataattaacttaaaataatccaaattaattaaaattcgaattattggtctaattaaatcctaaatgagaaacaatgcaaaatataaacaattaagcacaagttagggattaaaatgagtacagaaagatgagtaaatagtgataaatagtgactcatcagagagcttccgaaatactcgaaatcaatccaactttctgctgccataagttgtccatgtatcctggttccaaaccaatagagcagaagaaccggaaacttggtccagaaagaagacaagccttggaaaaacacatcagggaactgctagaagctggcttcatcagagaaatacaatacaccccctggctctctaatgtcgtaatggtaaaaaagtccaatggaaaatggagggtatgcgtcgattttaccgacctaaacaaggtatgccccaaggactcatatcctatgccaaacatcgattagctcgtggacagttcggccggattccagctgttatcattcatggacgcctactctggatataatcaaataccgatgtacccaggagaccgagataaaaccgttttccgaggcgtgaacgctaattactgctacaacgtcatgccttttgggctgaaaaatgccggggctacataccaaaggatgatgaataaagtattcgctgaccaactcggacgaaacatagaagtatacatcggcgacatgatcaccaaggcacctgtcgaaggagatcatatccgagatctagaggaaacattccagaagttgagacaacacaacattcgcctgaatccgacgaagtgcgcgtttggggtgaaagctggaaagttcctaggttttatgcttacatacagaggaatagaagcaaatccagataagtgtaaagccattttggacatggagttcccgaccaataaacgacggatggcggcattaactcgttttcttccgaagtcggctgaaaaggctctccctttcttcaaattactgaaaaaggaagctattatagggtggatagggtggactccggcatgtgaagcagcatttttggagataaaaaaatgtctagcatcacctccagtactttcaaaaccggaccccggagaaaccttggttttgtacctctcagttggggaagaagctgtgagcgcagtattgataagggaggtcgacaagtctcaattaccagtctattttgtgagccgggctctgaagaactcggaattgcgatatcagaaactcgaaaagatagctttcgcgctcttaacgacagcaaagagacttcgtccttactttcaaagccacaccgtggtagtaaggacgaaccagccacttcggcaggtgttgcataagctcgacctcgtagggagaatgatgaactgggctatccagttatcagaattcgatatcaagtacgaggctcggcatgcaatcaaagctcaagcactggccgatttcctcgtggaattgacgccgacatctaccaacccacaggaaatgccgtcatggaagctatatgttgacggatcatctaactcaaagggcagtggggctggaatcatcatagaaaatcccgagggagtatctattgaacagtcgctacggctcaacttcccaacctctaataaccaagccgaatacgaagctttaatcactggcttaaagtatatgagagaacaaggggcattgagagttaaggttttcactgattcacagcttgtctcggctcaaatagatggaaggtatcaggttaaaggacctttgttgaccaaatatttggccaaagcgaaggaaataatagccgactttgaagaggtaaccgtcacccacataccccgagaggagaatacccgggcagacatactgtcaaagctagccaatacgaaagacgccggaaaccacagaaccgtcatccaacaggacgtggctcgaccagcatgtgtgatgatcatcgtctcagccgaggattggagaaagccaattgtcagttacctagaacaaggaattttaccagaaaacgagatagaggcgaaaaagttgatctgagaagcagccatgtactccatcgttaatggggagttataccgaaggggccttcacaccccaatgttgttatgcctaagcccggaccaagctgaatacgtgcttagagaaatacacgaaggcattaatggccaacatatgggcgctagagcattagcattgaaagccctccgcgccgggtacttctggcctacaataaaaaccgatgccgcagaacatgtgaaaagatgcgacagttgccagaggcacgcaaagatactatggaacccgcccaccgaactaacgacgatcacggcaccgtggcctttctacaagtggggaatggatctattgggaccattcaaacccacagaaggtcaaatgagatggttagtggtagccgtcgattattttacgaagtggatagaagctgagcccctagccaccattacgtcggcccgaatccagaaattctttgaacgaagcattgttgcgcgattcaggatcccgactgaagttatcacggacaacggaacacaatttactgataagaagtttcaacaaatgatgaatgggttgcatataaaacatcacttctcttcagtggaacatcctcaatcgaacggacaagcagaagctgcaaacaaagttatcctggacggactaaggaaacggatgcaggaagctagatcaaattgggttgatcaattatactacgtattatgggcatatcggaccacggcccaatccaccacccttgaaaccccgttcagaatgacctatgggtgcgaggcaatgattcctgtggagatcggtcagccctcgtggaggaaacaatgcatgactcaggccaaagacaatgacgcagcactagcggccgagttacagatgatagaagaaatccgagacatagctcatcgcagggaagtagaggtaaagcagatgtcggcacgtaaatttaataaaaaggtcaaggaaagaagattcgaacaaggagatctagtactgcggagagccgacgtcggaaacaagaatgcccgagaggggaagctagcacccaattgggagggaccttacagaatcacccagaacctcgggtagggagcttacacattagagactctcgacggaaaaaacataccacggacatggaacggagacaaattgagaagatattatagctagagccctgactaaagaccatggatcgccaatatgcatacacgaatctcttatttatgaagatcgtggaataataaattgatatgtaatcgtttacaagacatcatgaaataatatgagtccttatataaaaaggaatttatatattgtgcgcacaatatgatatcttgatggtcctcatatcacctcggccctgatcaggtcgaagtaacttactcgagggaatctgaagctcagacccaccagttggataaaagctcggtcccatcaagttgttaagatatgtcggccaccgcggcccttggctatctaaaaagccagggtctgaattctaatatcttgatggtccgcgtatatacgtcggccatctcggccttaggctatttgacaagccggagtccgaaatatatcttgatggtccgcgtatatacgttggccaccgcggcccttggatatctaaagccatggtctgaaatctaatatcttgatggtccgcgtatatacgtcggccaccgcggcccttggcgatctaaaaagccgggtctgaagtctaatatcttgatggtccgcgtatatacgtcggccaccgcggcccttggctatctaaaaagccagggtctgaaatctaatatcttgatggtccgcgtatatacgtcggccattgcggccttaggttatataaaaacccagggcccgaaatctaataccttattggtacatcagctatcgtgatccgtggctattcaatagccaaaatccaaaaaactacatcttgacgatccacgagtatactggtagccgagatccgaaataaaatcatcgacctcggcccaattccccggtgggaattcccgagcaataacaaggcgttaatcgatatagatcccggtaaggcgaaaaatccagggactttagtcaaatctcgagatacgacaatccgatatataataaaccaggacacaagaaagaacacgtgataacataaaacctaaatcaaataacatagtcgtatctcaaatacaggaatatctccaaaaagacaaaaaaatactaatgaaaaacaattgattacataagaaaccggcatcccggcccttcagatcaaacttccgcttcctcgacgtacgggatcagcttattatcttcaacaaaagcccggtagtgaaccccttctaggttcagagaaacccccgggttcagacattgaacctgatccagagcgttagagaagccctcctccgctgccgattccacaacctcttggagatcggccacctccttcttggcatcctcagaatctttctgcgatttctcataaaggagccttaaatcggcaagctcctgcgccaaagaagcagcgtccttctgagccttcgcagcatcagccaaggcagcatcacaagaagttctaagctacaaagattgttccttcaacgtttcaagctcaccacgggtcgaggaaagctctcccatagtggcagataaatcggcccgagaagaagcaaattctccttctagcttgtgatgctcatcaaccaaggaagcatgcctacgcttcaaagaggccagactcggcatcaaggaagcacatttgaaagtatgaagttgaagggcatcaagctcttgaaggtcatcatcagacaaatgactcgaatctagaaacttcttgggtgccttggtgtaagggaaaaagtcgtcaacacccttctcccaaaggcatcctggggtaagggaggaggcggcagcaacattatcagcgggggtagtagcggtgcggacgtcggtggaagccggaataatttctgtctccccggaagaaatagtgatttgctctgctacctcggcctcgacggcagcagttgatggcacttgagaaataggggtcaccacctgaggaccgacatctgagccatcagctttccgcttcctggaagggggcaggcggttaaggtagcgaaaatctcggccaccaacagccttcttcggaggacgagaagaaccttccatttgggcagctgcaaacagaaataagcacgttaatacaaaagtaaaaggaaaagcacattgaaaagcaagaataataaaaaggaccttgggcatctcggtgtgataaaatttggataagggcagatgtctccaaatctgaaaggcttgactcatcagtacgataagaggccggagtcattaaatgatggtcctgagtccagtaaagcgggaatttccattccaccccgggagactcaggaccgaatagaaaaaagggatgtttaccaggttcggcaataactttgaaaaaattattcttaaacttctttaaagaatcggagtaaagagtaaaaagatggcggtctgaacgactacggagggaagtccaccctttccgattggagggttcccgaccagtacgatgggtattgacattaaaaaagcaaagaaacaatgggacagtacaaaccacatttaagtcctcacacaagtcttcaaaggcttttacgaaagcccagccattaggatgcagttgagaaggagccaaacgaagaaaagataacagttgcatctcgaattcagataatggaaatcggattcctagacgttttattacgtcaatacaaaagaaaaaatagctaggctcatctgcctcggcacaagaacagatgggctcatcaggggaagggaggcggatggagaatccatcctgaatacccacgggaagagctgcaataatttcaggagtaaaagaagaagaagtactgagtacttcggaagtcacccaaggatacttggagactagagcaggaggaggaccatcaggctgagatccagcagactgagactcgccaaccatctccaaagacgaagtgtccataagctacctatgacagaataaaaacagagtcagaaaaagggggatacctgaaaaggaagctgaaataggaagagcagaaggggtagccgacgctgagctggaagtcggtcttcggacctcggcatccgacaccctagccgtcgtagagatagcttttcggacggggttgtggcgacatgactctaaaatctcgccagaatattcataacgtccaatatggacgtagtaatgaaactcatccatacacttcgaacagggctcatattgaatttcaaatgcaatattagaaggatcagggactacagagggtgaggaacttgtagggttgactgaagaagggcaaggacgattggtcaaaatttcaagggctcccctaaccctagagggacgatgacccttaggagggcctttaggcctagaggttcctacaatggaggattgttcaaaagctctctcagccatgatttcagtaggggtcatcccactatagtccgtacttatacggatacccctcctacgagaagaagacacagcataaggtttcctaaggaccctagaactcccagaacgatcccttaaaaggtctctccttttttcttcttctgaaagagggaatccccaaagccaaaatgcagacctagggggaacatgtttgcggacaaaagcctcctcctcaggagtaatatccatggcgaaagaggaaaaaggggagaggataaacagacgcacacggaaaagaagagtaatctatgaagaaaaggtgcagaaaacccaaaactaatgaaacaacacaatagaatacagtaacaaagaaataaaaacctgagaaaatgaagggctttgaagaaacgttgaagatgaaaggatattcacctggaaacagaaaccaaaagcaagaaagatggtagtgcgaagagagaatgaatatgagtgaagaggaaaatgaagaaatgggggaataagagggaattagaagggtaaccaccaaaacccaaaaacgaaacgtcttttgaaaaaagtaaccgtcagaagcgaaaagacataaaggacaaatatgacttttcagtaacacgtacaggggtggaaatgaaaaagaaagaaaaagggtcatgattagaaatttaaagagctgtcgcatcgcattaaatactaagaaggcgaaaagacattcaggaaacgtgaagggtcagaagaaccatgtgcagaatagtctagaatttcccgaagtccccttccctaaaaatcatccctgccaaccaaaccggcaagatgcaataaaaagcacaaccgaagtcccgatgtcaagaaaccacctcggtaaaaacaggaagtcctaatatagaaaaatagtcaactcggccgtcaaggggagatcatttacttcggccactgcgatgattgactcacctcggccataataaccaacgaaagtgaccctttagcgttagaaaaatacaagcattcactacagctcggcagatcagaatgctaatcaaccgagctggggggcatctgttccggaaacgccataataccgaagtaaaagataagaacctaaccaatctatccaaatatccaatattcctttatcttatctataaggtacgagataacttctatttaagtgaagataattctttattatcattcgttattatcttttcaatagtttatctataagctatggcccaaagcccataaatcactatataaatacggcaccccaggtaatcagaaggtacacttctctagctctctcttttcaatacacactctgcacacacctcacgtccagattgtggtgtttctcccagcaagtgtgatcttcttccctgaggtgttctttcaccatagacatcttcaggagagagagagtttgatcccatatcaagatttccagcaactcagttggaaacacctccgttcttcttgaacggaacaaagtgaaacaacacaacccccaaaatcgaaacgctacaagctccaaaacgagccataatttctcacactatctcagaggtaaagaaacaaagcaatttcagaaacccaaaaccccaatttgaaaacgcacaacacaaccaacaagcccacaacaatttagagcatcataaaccccccaatcaacacgcagcaacacccaaacaaaccatgaacagtcccaaacgcagctttcccccaaatcaaaacaaaccccaaaatgctacagcaaagtgacaaaggagagaagaggacatgctaatccaaaatgtccttttcttcctccttcaaactatgagacaattttgataaaaaaaaaaaaacaaattgcaaaaaacttaatcaaactgtcttaccaataacactatagtaacattaccattgaaccaacctcaatccaacaaaattataagttaaatgaacaattataaatttaaaaaatcaaatgaaattatccaaatcaaacaatcattgatccaactcacaaaattactttaatcaactcaatccataccaacgataataacatttaagtctaaatatattttaaaaataaaagaaggcatgtgtaatttctttaaactttaaagatatttgtttaatttagtcttaaaaatacattattagtctttttctgataaattattataaatgatgtaaaagagtgtttgaaacattaaatgacgctaaagaacaaaataatttctcaatttttcgtacctatgatattggtgtagcgtatttatcaattttgttgataactaatctccatagaaaaatttgattaatcacctttaatagagtttttcctcttatgttttttcattcacaaggttaaaatttaaaaccttacttaaaaatagtacattaccactcggaccaatcatttgttgataaaacaatttctcatttatcataaagaaaaatgagttttataagttttaaaaattaccagtaattattatgtaactgataaataactgattttttaaaactggcgtcaacatgtaatttagttcacaatcaattaaaaaatacatgcattaaatcgtttggtttagtaacttacaatcatttaatatcttgagcaataatattaccgataagtagccatattcgtcataatatgtagccatattcgataagaaaaatttaaaaatacaaacaatattattaaatttacatgatattggaatatattctggtactgtaacaaccagacactgtagaatgtgcatgcatctgcactagcttacccgttgacaatatacttcaaaaacaagagagggccatgcttatcatatttagattttgcactcatcaattacataggtcatcccgattaagcacttttattaatttatagctgcattatgtaattttcgacaacaaagcttggtgaatctattcgttgtctctaggtagattaagaatctgctcattcttaacaaatcatatggtccttttcagtcagaaaaaacaagaatttttccagatgattatttgtttaattatcgctcttactcttactcttccccttccttatagttatcatcaataagaattatgttgattaaagaagttgtttaattattattttgtgacattagtaccgtataaatttcattaagcataaatataccataagaacatttgttcccattatcctccgcgtagatccgccactgaatacaatgaatgattgtcatgtatgcgtgcatattgtccaagtttttgtgtccaagttggactcaaaagagttagacaaaacaatgcggcatcacaagagaaagcgaaaatgctttctgatcgattataaatgaaaaggttctgttaaggaatattttgataaaatttgctcaataaaaaatattaaataaaattattttgaatatctttcagagttgatatagattttttgtttagtttttttttttttatttcttatcagaatgctatacatgtttttgtttcgcagactaaattatactcctaagaatactatttctcatgatattattctcaatcaatatgtttgataactgcttaatattttttatttttaattaaaaaatagattaaagtgaaagtgaaaaattagtttagacaataacttattttcatggaaatataatattatcacccatttacatgagcggagaaatcttgtgtaatatatatttttgaaaatagttttttttataacttatactaaacatgagaatggtccattttctcaatttatatttccgagaataattttttatgacttaaaataaacacactctaacaaaaaagaagtatcactgaaagagtatatatatttacgctacattcggttgtcgttgcgttgaaaaggtgctgaaacccactaagctaacgtggtcttagtggtttctcctttggtaattaaaacttaataattggagtactcatcattaattgtccatgatgcatgaatgaaatcatgtagaaaaactggtggaaaatgaaacacttatggctgcagtgtcgttctcttattctaaattcttaaggtattatattttcagttcatgctcctcttaacaatggtagctttgtttgactatttgacccacacccgtttttgtcgttacttagtttcttttgaacttgaagagtatgctataggctgttgttaagtgccacttgaatcttttgctgactaaggatcttgattaaagaatttatcaacgtgcccgtccaactttgtttgagaatatatgtcactttggcctaaaaatcattatctaacaggaactatcctacattcctaccacttttgacgatataatttaagctttctttataatttgggagagatccattaatccaatatctgttagttgaaaaagaattagaataataaccgtacatgggcggctaattaaaccaataaattatcactgcttcgtattaggttctaggggtattttcttaatgttataatttaaaatatgattataataatatcactacaaaaaaaaaaaaaagctactccaacttggttaacagaatatctaggttccgggagtattaaatgataactttgtctatattgttatgatgtattaatgaagtatactaattttttacacacaaaaaaaaaaaatattgatcaataatatattattagcatacagttacaatgttttatattgcaatttgtgggttggggtggggtctagccgtccaggccccttccttttaaaaaaataaaaattacagttccaataggtcataaattttgtttggatcatcaaacatacgtgtatcataattaaagtatcatttatttaaaccaagccaacttaattataatattgacctttagtgtgtgatttaccggataaaattttgatttttattaaaattaatgccaaattaaaacatctatgcctaaactttaaacttgctgtgttcttttaggtgaattcggggcggttctacagagacagtagggggcaattgcccccattttttttttttacctaaatatatttaatattttttttgctcaattaaaaatagatgttgtatctataatataatattttaaaaataatgtaaaaaagttataaaaaaattaatactaatttactcatttttatccttttagtttttactattttgaatttctctaatacctttttaataaaacttatattattttttgtctcaaaatattatagactatttttttgtttccactaaaaaaatttgattccgccactcatttaaagttacttgttcttagtatatactacccttgttaatttaaatgagactactatacgtgtgtgaattaaaatgagacaatacgaaagataaaaaaaaaaatcaaattatagatgtttgtcatcatacaaaaaaaaaaaaaaacattaggaccaagatagtctcacactattgtaacaccctcacattttcatatatatgaaatttctttaaatatgcattcttgaataaaaggacaaaaatacccttgaacattttaaaaaaagacacctatgtcccttttaaaaatgacataaatatccttggacaatttcaagaatgacagttaggtccctgaggcaataattgaccaaaatacccctgaatattttattaatgaccaaattgcactaggaagtccaataaagacattttaaggaaaaaatgttataaatatccttagatgttttagaatgaccaaagatacccttagagtgacaattacagagagatcctgaacattttttggaaatgacgattttacccctagagtgaagggaaaaattaccaaaatgctcttaggtcaaaaaactgaccaaatgacttttgaaatttgtgggaacctcaatatgggatcaaatgcttttagacaacacattattaacatgaccagtggcagaaaaccctaaacagtaatttctaggaattttgggaaagattttgaaaagagctcgatctaggttaactcaagcattcgaaaaatctaggaaaatggagagatataatctatatgatttattcttgattataggaggaataagagttttaaataagttagtttggtaatttaaataattagaggcaaaaggaaccaataagaaacaagaaaaaaactaagtaggaaaataaaacacaaagcacttaaatctaaggcattccacgtgagaaaaagaaaaccaagtaaggcttgctctccaagaatgcaatccaacgtgaaagaggaaggaaaaatgaagaattttcaagaagcataacacttgaatggaccaaagtcattagccaataaaaataaaacaagtagaaagcaaaaaatgatggcttaaagaagattttttttctaaatgcatttcctcttgactcctttggacctgtagacagttataagtattatttcaaaaatcccaacggttaaaagttagatatgtaagataggagtatgcctttaaaattttaaaaagatccaacggttaacaagttcagaatgaatattttttgtaacatgggttttgggtagaaaattttatgactaaacctaagctacctcacggttttcaaccaaaatacagcaaacttaagcaattccatgtgcaaaggcaagatggaggtagaatggtatggaattttattgaattaggacacttgtatggtaggaaaactttggccaataaaaagaatccaactagaaagctaagtaatcataagctttagagatttttgtagaaaagccaatccacttagcatataaataggagaggggccagaaattgagagctctaggagagcctaagaccgttcaatattcatccccaaaagcttgtccatttcttttcatcttaatactactttttaccaaaacacaaaacacaaagcctaactcttgagtccacgtgaagactagccactttaggagcaaggattcttcaatttcaaataaggaaaagctgtccaaaagcttaggaaaataaggtatggggagtttatgttgagcttagtttgaataataatccttgtttgattttattttgctttgtagactaggtgtttgatgaaatgtctcaaagagtttgaatgactacttgattaagtaacttgattctaaattaaataactaagggttggatgaataacttgaactgaaattaataaagaagagtaagaagtaacctaaaattagtggtagtataattatcttgaataaattagttgtttagaattatggttagttaatggaataattttactataaatgtaatgttggctgaaattcttctatgttgttctaaggatatatatatatatatatatatatatatatatatatatatatatattagtttgacactagaacttggatgagaaggtgtttatgttgaactttatgaagatccatgttatatagctttcttttaaacaagtattctatattgcacaccatgtgtttgatagtttgtcacaatgaataaaagatgtttaggtattgtggatttgaacttttattgttggatatgtagtatacttgcatgattgaatgttttaaaggaataactatgtgtttttacatgtgttgttgagtgtttccataaaagcacaccaagtgtttgataaaaggtttcaaagaaataaaagaagttatgtgatctttcataagttgttgagtaattctatatactttaaaattaacatgttgcttggtggcttatgattttgatgttgagaaataaattagattttgatgttgagaaacaaattaagaattgtgttaatgatggaataattggaatccttgtgctgtatggtgattatttatggattcctagagttgtggtgaattatggttgtatgctgagattgtggtaaactttatgagccgttctaaacaacatatgacatgagttgtaaagatgtttaaagacttgataaaatgaatcattcatgcatttcatacgcatatgcctagcgggggttaatccgtggagttatgcctggcgggggttaatccgtggagttgtttgtcagatagctaaaccgagtccatgcgttcagagcttgaactgggggtaatgtgtttcagggaggaccacaccaccatgatgatcacataggtggaggtgacattcctacgcgcccctgccctatcccgactgaatggataggtgtgccactgggatgggactatcttgattgtggccactgttgatgatttaataacctgagatctcagtcatgcattatataaaaagatgagcatgcatcttatgcatcacacagttggatatatgtttgatgatctgtattctgtataagttgtgtggtctttttatgattaagactttatccatctgtgaatatacatatatatatatattattcaaactatgtttgtcataaacttacccgatttgtgtctgtggttgacacctgtgatgaccccaattcatttgggcgagcaaaggaacaggaaagcatgagttgtagatgaaggttgttgaagaagttttgatgaactgtttgttgtaatttgtaatttcatatggcatgtaatttgtaatagacagtctgtgtattattttgataactgactttgaactgtatcatggactgtattcttattataaatgaactgtggtaaggaaaatcatttacgctacttacgaatcataaaaattagcaagcaaagtgaaaagaattttcgtgaaaaatttataaccaagagcattataacataaagtgaacacgaatttcatctaaaattaatcaagtacgagagagtcaagagaggcgttacaactatggtattgatcagaacaaaaaaacaatgattagattagtttaataataaataaaaaaactaatagtatttactatgtgttggatctatgaaatgaaagattaaacaaaatttaaatcaaaatgatataaattctgcaagtatcatgtgggttagaaagcatctaagaagcatcattttatcccatgcaaaatagatggtttaaatgttcttcgtttgatgattttgaagacacgcttctgcctacgtttacctggtgcttttcttggtgggttttgctctcatttattcttgctattcatatttatttattttttttatgcagaattacgaggcatgaagctagctattggcattccatcataatggttttggcgatctctttggcttgaatcagactgacagctggtagtcaatgcttccttggtccctttggaataattggattattgctttggtttgctgtaatgagatgtctttttgagttcttttttactatttataattagaggtttatctggtgggattcccctcctagtttcctaagaacatttttccttgtggataaaatagggctctcatcctatagattttaatgttgttcttttttcatgggtttcaattatgtccccttatgcatgttttttttttctttgaataaattgttgggtacttcatatgatcaataggtctatagtagattcaacctagttcgtattattagacctactgtgatgctagcagctagccacttcagattcattaaaaaaaaaaaagtctaatgtttacccacctataaaacacctttatcaagttgtttccttatcacataaaaaataagagatgtaaaattttccattaattttgatacagtaaattaaaataatagaaatgtgagtagcatattttctaacatgttttttttaacaaactctttattattggttgaaatttattgaaaacgacaattttttgtcgacctcacctctatttaatgtttcactattctaattttataattttcaataagtttcaacaaatgagaaagtatgttaagaagaaagtcttagagtgtgtaactaatcctcttcttaaaataatattactttatcttatgtgaatatatatgaggattataggaagcttttttggagtagaaaaaatatctaagaccaactcctcctatttaatgactaattcatccttcaatatcattaacattagttaattaattaaagaacattcgccaaaatagaatcttaccttttgtatctttttaacacatgcattctttattctagtaaaattaaaataaaataaaaaacctccttacagggttgtttctgaaaattctttggctcaggacgaattgaaaaaaatgggaccctaacacacaatttttttgaaatataaataacattaaaagatataaaattcgttacatcccaaataattttcaaaactgtatatgaaagatacatataatgctttataaaaaccatttccttcgtacatttcttgacgcaaaatcatttatgatcatatctacatcgattttatccaacatctttctctcaatagataacattgctggaccattcaatctctcctgcgacattgtcgatctcaagtaatttttcaataatttcaactttgaaaaaacttctttctgcggaagctactgtcacaggcatcattaataggatccgatatgcaatagaaacgttgggataacaatctgcatttttgacaaattcaagaatatcaattgctgtcattgactcaattggtaaagtcatttgcaacactttcattttagaataaaagtcatctgcatcaacatctgacaaattattatgagaaaatgtatccttaaaattattgcaacaatcccttgctttccaaggacttcaaccttgtagagtcaattaaaaatccaaaaacattttcaaaaatctttagttaatcaaatctgtctttcaaagaagcaattgtcatatccacaatcaccaaaaagtagttaactctaaaagactcctcaggtgattgcaaatcttcatcatgacaatcctcaccaaattgtttttttttttctaaaaataggaagtttagttggaaattttggctctatatccatacttaacgcaagatctttggcaatactcatactagcttcaaacccttcatttctataattttcgaaatataatatgataccttccacttctttcacagtagtatcaatgcacattgtcttggattatagttttttactcaccttgttaattgaaaacaagatatcataccaaataaccattccaagtaagaattcaaatttttgaagtgcattagccaaactttctgcttcactttttgctttagcatcattacgtgaagattcatataattttgataggcatgaaatctaatagctttgacacttttaattcgactttcccatcgagtatccgatagagatttcacagtttcgtaaacattttcaccaaaattttccaccttttggtagaacttgcgaacaatgtatatatacgttgcacaatcccaaaaactgaaatagcttttgtacaagaatgtaccatatcaaaaagagtgagattaagactatgacaagcacatggcatatacaaagctctgggatttaattcaagtagtctccttgaacaccttggtgttttcctttcatattggaaccattatcatatccttggcctctcacatcatcaacattaagctcaagagattttaatgcatttaataattcattataaagccccattccggatgtatgacccactttcaagaattctaaaaagtactcttctacttttattttgtcactcgacgtattaacacatcgtactattaaagtcatttgttcttgatggctctcatcaggggtacaatcaagaataacagagaaatattttgcctcttgaatgattctcaaaatagaacttctaacactatgggccaatatagaaattagctcattttgacttttatgaccaagataatgataatgcatttcttcattttgaatacgtctaatatggtcttgcattggcaaatcaaattcagcaatcatttcaattaagctaaaaaaattaccattattctcctcataaagtttctcatttgatccttgaaaagctaaattattcttaccaagacatttaactgcaacaattattctcaagaaaacatgtctcaatcgttctttctcttttgagattccttgctgcaagtctttatcaagagtttgattagtttttaatctcactcttaattcagtccaaacattcatgttagtcctatggtcaaaactattctcacgttctttgagtttttcactcaagtgttgccaatcattcactccatcaatggctaaagagctctttctatttagctttgtgaacaacttacaacaaaaacaaaaaaaaaaaactttatctatatgtttagagtaaactaaccattttctatcgctactctctccattaatcaactttctagaaaaataagcatacgagaaatgcctagaattaccatctaagggaaatttaagattcaattcccttaatggccccttttcaactaagatgtctctagacttgttatcaaggataccccaatttctaggatcgtaaatgtctaatggatgaacaaaatgtggatcatccccaacatcttcaacatttgactcattttgtacatcattaggatcattcacagtagcaaattcctcattgatatgatttggggaattatcatggtcatttgtatcagaagcagccacattcgctcgattatagtcataattgggatcatccaaattaatagtattatcattcacattttcattagattggcccacattgtctacttccactcctttagaagtctctcctattcttttcttaaaaaatctatcaagagatcccctttgtgattctactaactcctttctttcttttctcacttccagacaaatatttaggcaatattattaggcaatataactaataactaatataactaatatagataggaacaatagcacctggagattggagaattcaacaaagataattagcttaatcctttgcgttctgaatttgcaatgatcagccaaggttcctgccaataaaattgactaattaaacctaataggaagttttagtaaaagtttcttgattttcatgtaaaacagtaaaggttacactaaatgatatcaactaaacaaatgttgcatacttatttctctcagaacagcaagaaattgggagttgcacttgatgagtgatgacgtggaactggcgaaaaagcacaggactgctgctgcagttgaactcatagtcgttttgggagcggtggaggatagtgtcggctatggcctttgtggctgccagcttgccacgtttgagcaacaagttcaagttgaagtcagcggcgagtttgctctttgatatgcccttgttgactattgttgtcgttgcattataaaattgaatgatgttaccgttttccatatttataatttacacaatagttaatagcaaagatgaagaaaaagaggaagagacagagccgcagatgcaattaaggtggtatactggtatgacttatggttagactttagagacgtgaagtacagatgtacagagacagggccaaaacacctcaatacacattaacaaaaaaaatttgggccttgggcgggtgccccatctgccctggcccaaggccgaacctgcctccttattgcccaatggaagctgccatcgattgagaataaagaagggaatgttgggtaacgcgtaccaaaacaaccgtggcaaaaatttacctatcaccatatccatgtgaaagagcataagttgtgtttaatattttacctctttgtagtatgatgaacgctgattttcggaaaaccacgtagtctagtaatggtaactggacctctacgtagtccactgcaatagattcctctaccatctcaggatcgaggaagggagagcagtgccagttgttgcacgttcaagaggtctgtgacgactaggatttctaacacacactgactgtagtatgtgacaacaatggtgtgtgtttcagtgccttaggagcttcttatcaaattagaaaaaatagttttagcatcgttaggttaacattaatttttgataaaaaaaatcgatattaataaaaatgtagtagcacattcgtaaatagagttcgttagcatcagtttttggaaaaatcgatattaacaatcgtcacttcaacatcgatttttgaagaatcgatgttaacatgagtttgttaatatcgattttttgaaaaaatcaatgttgtgctttgatgttaacgtcgattttatttaaaattgacgttgtttgtcctatttaagtctgttcccttttcttgcgctcactctcactcattctctctctctgcgacacttctctcactctcaaatcctcactctctgcactgtgactctcactcccgctcttgcgctctctcactctcattcttgcgctctctcactctcaacgacgtggcggctgtgacacttctcaactttaactctcagcagtggcgacaagggcatctccaccggagaggtcatgaaaggttagcttgttttgttttctctactttctctactttcttctcgttcttgcactgtcatttgatacttttgtttgttctgtgaaattaagttgcttacaacatgtgtttgatgaaatgtctacaatgggaagttctattttatttgtctccggtgaagattcttggaattgtgctgcacatatatctggaacatatttagtgaaaaataaatttcatgttaataccgtgactggttttgattttaactaaagagaaaattttgataaatatgcaagagaagatccatattgtactaacggtgttaagcactgatgcttaacaaggtttgcgtctaatagttgctcccaaattaatagtgtctcttgctttcgttctctttgctttttgtttttagggaagctttcgatctgtttgctaaataaaattaattacaggcattttaagtaagtcctgaacttggctcaaacatatggtctgatgggtggcatatataagattaaacaatttaaatgaataaaaagctctaataaattgtataatgattgctaatttactgttaatttttttgggggtaattcttaattatgattgctaccttacccgtaatctttttttttttactttttttttatgagaaaaagcaaacgtttgttactttatatcaatgtaaattcgaatatctagcattgctaacaatattattctaacttttgatgtaagcctctgcctttgatattggagtttttatattatatatagtatcttagcaataaatggaaaattcctacattactactatcaatattaggtccatacaaagcagagatgagtagaaaataaaatactcatattaatttatattcatttcacaaaatgttacatgcaatttcctctgtcttcaaaagataagctagaggtaaaaataaaaataataaagtatataaaaaagaaataaaaatgtttgagcaaatataagtataacgtaattttatttgcaaaatggcacccgtgtaacaaatctcatagtatcatatcactatcattgtccataggcttatccatacttttttgtcagaaaagaacaaaaagacttgagtgtgaactgcaaatataacagtaattgaatgaggtgaagagtatatagttcatttgcagtttatttttgcctatttttcttttcatagttttatttaatttaatgcatagtaaggaaacaactggagtaactgctttgtcatcaatttgagtacaaaaaaaaaaaaacgaaaagtataatattcattcttcatctatatatagactcttaaatatgctaagattataaattgcttttatcgtctcgtactaaaaaacgttccacttctttgtgtgtggttctgtgttaacttttactttgaactaatttattttttaatggtattgcagtcacattctcatactaaaaaaatggttattgttgtgatagaaaggaacatataggataataggataccaactatcctttaattaagtaggtgttacaaatatactaagatgaaaaaaatttcctacgtaccctgatggtccaccatttaacgacctcactttctcacattacattaattatgaaaaataataatcatatatactaagtataaaaacaattaaataaattaaaatttaaaattagaagtaacaaataaataaaattaaaaaaattgaaaaataaaaagataatgactcggagttcatcttaattaacggcgccttgagcttggtattgtggttcgccttcaactaatttttatgaaaggacattatttttatatcaatattatgataaaatgcttaaaaaaaaaaaaaaaaaaatatatatatatatatatatatatatatatatataggtcctcaatttgcaaaacgcgacaattaatctatctttcactctcttaaatgattatcttagtcgctgccacttgtcttctccgtagttaattgatatctaatcataaattttcacccacaaacaataaaaataaccattacaagtatttttagttttttatttcttcttgttaatgtaattttaattgtaatttgtaggtactttttcttttcctatttacatcgtcattatgagatccattgttggtgattgttaatgaccatcatgacaggtacaaatgtttttcatacttttttatgctcttttttcttacgagtgcttttataacttgtttttattttattaatgactattgctttatataaaattaatgttcattatgagtgaaccttagtttcccgtttgagattcaatataataattcttttggacagtttggattaattgttatattgaatcttgaattttttgtttgaacagtttgggaatagtcatttttttatagtagattcatatgtataggttaactttattttcttaaatttgatgaaatttaggtatagtgcatttcacttggttctccttgtgcatacttgattgtggtggaattcatttcaccgcattcatatcatgtagttggagatcaatgcgaaatgctacaaaaattttgtcaaatctaagaaaacaaagttaacctttacgtatgaatcaattataaaaaaatgtcttcctgaataggataggactaaacgtttaatgaaaaaagtgaggttttcatgtctggaataactttgtgactatcacagaattattaattagatggatcaaagttagatgcatgcaagtcgcatgagccctgcgtttgaggaaggcgttgaacaattctttgaatttgcctttgaaagaagtcaaccagatgaggatggaaaaaatttatgtccttgtataaactgtttgaatgggagacgacaagtactagacgcaatacgagaacatcttttgtttgatgggattaagaagaattatacaaaatgagtatggcatggtgaattgacagacatgcagaggggatcccaaactgaacaattgatatagaaataatgggagatcgattagaggatatgatttttgatcttggacaaaaatcttttaagcaatcacatgcccctatgtatgatatattggaaagtgattccaagaagcctttgtatttaggttgcaagaagcctttgacgttgttgttagcgattgtaagtttagttaatgtgaaggccaaatatgggtggagtgacaaaagcttcactttactacttcaagtagtgcaggatatgcttctagagaaaaacacattgccaaaaagttactatcggacgaagaagatactgtgttctgtggtcatgaagtattagaaaattcatgcatgccctaatgattgcatactgtacatacatgaatttgaagaaatgcataaattccctaagtgtggggtatcacgctacaaagtgaaggatgatgacgagtgtagtagtgacgaaaacacaaagaaaggccccccagcgaaggtgttgtggaatctttcgaccattcctagatttaagcatctgtttgctaatggagatgacgcaaaagaccttacatggcttgcagatgggagaaactacgatggaatgcatcgccgcccagttgagtcctcctagtggaagaagattaattgtttgtatccagatttcagaaaagaggcaagaaatcttaggcttggacttacgactgatggaatgaatccttatggcagtttaaacactcagcatagtttgtggactttttggctagtaatttatagcttgcctccattgttgtgcatgaagaaaatacatgatgttgtctatgatgatgttgggcccaagacaaccaagaaatgacatcgatgtttatctgagtcccttgattgaaaacttgacaaagttgttggacgagggggttgccgtgtttgatgggtatcaaaattagacattcaagtttcgtgcatgctattttgtaccattaatgactttccagcatatgggaatttgagaggttacagtgttaagggccatcgtgcatgccctatctatgaagaagacacaagctacgtacaacttaaacatggaagaaaaacaatatacactcaacatcgatgttttatgaaacctcatcacccttaccggcatttgaaaaaagcttttaatggcagtcaagagcatgaaagtgcgtcgatactgttaactagtaagcaagttcttgagcaagctgaggacatcaatattatatttggaaagatccaaaagaagcacacaaggaaaagttgcatacggaagaagaagtctatatgtttgatcttccatactggtataatttagatgttagacattatatcaatgttatgcatatggagaaaaatgtgtgtgatagtgtcattggcacgcttcttaacattcaagtcaagacaaaggatggtttgaatacccgtcaagatctagctgagatgtgtatacgtgaccagttacatccaaggtttggtggtaagaaaatatacttgcctccacaatgtcatactttgtcaagaaaggagaagacatgtttctgttagtgtatgaaccgtgtcaaagtgccacaaggatactcttcaaatattaagagccttgtgcagttgaaagatatgaaattagttggcttaaagtctcatgattgtcatgtcttgatgcaacaactgttagccatagcgattcaagacattttgcccaacaaagtgaggcataccataactcgcctgtgatttttcttcaatgctatttgtagcaaagtcattgaccctataagttagatgacctagaaaacgaggctactattatcttgtgtcggttggagatgtattttcctccttcatttttcgaaatcatggttcacttaattgttcatctggtaagggaaattaaacttcctggtcccatttatttagggtggatgtacctagttgagcgatacatgaagatcttaaaagggtatacaaagaatctacaccatcttgaagcatccattgttgaaaggtacattgtagaagaaactattgaattttatttagagtccattgaaaaggcaaaacctgttgggcttcccgagtctcgacatagcgagagagtgagaggtaagagtttacgagggttgcatgccataactcccggtctagagaaattgcaacaagctcatttgtatatactgaataacagtaatgaagtcctgccatatacgtagtttatcacaaagccttagtcaaagaaagtaacccataaatagctaggaattggatgttgaaagagcataacaagactttcctaaattggtttaaagatacaatctttggtgaccataatgcctctaaaaagttatggaagttagcagatgggcctaaaagaaatgtttgaagttggtaaggatacgatatcaacaagtattcattctacaccaaacaacaagatgacaagagtacaatccaaaatagtggggttagtcttagggatgaatcccaacactttgctattgtacatgatcacaatcctcgtctggcgtccatcccttactttggagtcattgatgaaatctgggagcttaattatgttaaattcattgtgtgtgttttcaagtgtaagtgggttgatagcaatatcagtgtgctaactgatgattttggatttactttggtaaatcttaagaagctagcttatcagaatgagtctttcatcatggcagaacaagctaaataggtgttttatgttcaaaatccttgtgatgaaaggtggtcattggttctacatggaaaaatcattggtattaatcttgaaaatgatgattcaacccttgatactagtctcactcctttctcgacagaaatggctaacgtcaacaaagaaaaagttgacaacgtccatgaaaatcataatggtcatgatgaaggagaattaattaacatcgtttaatctaatcttttttatatttaccagtttcgacatttacaattttataacttactatacttgtgacttgactttaattaatgttgttttttaataggaacatgactacaccaccgagctccactcctcttcctgagtcagtaccttctctatctacgtcaaagaagattagaaaagcaacacgactgatgtaacgcccggccacttgcaggatcaacgactgtccctacataccaacacaagacttttcagtgtgctttgtcctcactcacacacttcctgagaaacttcccaggaggtcacccatcctagaattactccaagtcaagcacgcttaactatgaagttcttaagttatgggctaccgaaaagtagatgcaccttgttggtataggtagtacctattaaatccttttaagttatccttaactgtacagtcccatacctacacagcctttggatccctctcgttcgggtgtgtattcgattcattcatgtacccctttcgctggaagcctgccaagagccgctccttgttcgtgcctcactgcaccggcgatcactacccgtcctcgtcaacgcacgggatgttacatgcccaccagcttccgcctggttcatcctcgaaccacaccgaactggtagagaggccttgctctgacaccacttgtaacgcccggccacttgcaggatcaatgactgtccctacataccaacacaagacttttcagtgtgctttgtccttactcacacacttcctgagaaacttcccaggaggttacccatcccagaattactccaagtcaagcacgcttaactatggagttcttaagttatgggctatcgaaaagtagatgcaccttgttggtataggtagtacctattaaatccttttaagttatcctcaactgtacagtctcatacctacacagcctttggatccctctcgttcgggtgtgtatttgattcattcatgtacccctttcgctggaagcctgccaggagccgctccttgtccgtgcctcactgcaccggcgatcactccccgccctcgtcagcacccgggatgttacaactgagatcattggctaccagacccatcggtgtcgagaatccaatggttcatgtgaatcttgccattaggaaagttgatggtccccacaaaaagaaattaaggacgtatttggggatcattgctcgggacaaggtgaatgtgttataattggtaactagaaagaagttcctgcagctgaaaaggatttgatttaggaagacattcaggtatttgaattaaacgttgagtgttaatataattggttgtactaaaaatcataaaatgttgcatgtaaattaatcaacatttaaatgtattttttgtatcgcaggctgaatttgatattccagaagcggctgaccaaaggatgaggaagaaaatccttaagacagtaggagagcggtggaggcagtttaagtcagatttgacctccaaacgggcactagcacaaggcaaggaagaggataaagacattgtctatgagaagtacggtatcagtaaagaaaagtggaaccaattttgttagagtcgtaaatacccttcattggaggttagttgacttgcattttttatgaatttaacagttatgcattattttcaagggcattttgttgacaagtttatgtctaattgtgacagaatgttataaagaaggctcaagtcatccagaaactaaacattgcccttcacatgttatctcgtggtggttatgatttattaaaagaaaatttaatggaggaaaaacaaaagaaacgattgaaggaagcaacccaattcgagagcacagaaacaatcgttcatcctctttctcccattagacaacacgtgaagtggaagatgggtcgcaccaacaaatcaagagaaatgacgtctgagacgacacgtgaaattgcagataggattgtaagttaattatttgtctcaatagtcattaattaaatttgtaaactcatgcaatatttggttcattataggagaccttggaagagcagtgcacacaagatagctttgtcgcccatggacgtactaactgttaaactcatgcaatgttgtcatttagctagatgcagtctcatatgcaatccaaggtattcatatcgcctcttgagcttgaggttgatctttttgttaacagtgtaagcacgaaagaaagttgtgtcgatccctcggggcaggacctagacacgggtacatcagacatgcgtgggttatttgttgacgacagtcatccccgcctagttgcccttgaaagagtttgtaaggggtcaacaatcattcacaatgtccctttggccaatgatcaagtgaaggtgggtgttgaggaagtctgagatgttaatgctcgcatccctgtaccattaaagaggttcatttagtgaggcaggtccataacaccttccttgattagccgacacatcttttacaacctatttcaaaaaaggtatttcctttttgttgtgtttattatcatttaaaaaggatttgttacatataaagtgttgactgtcattgacttatgtttattaactttgtaggataaacaaagatctgagggaccgacaaaacttgtacgtaagccagaacctaatgaagatcctctataccagatcgcgttgatgatcccccaacttttcctcatgcctatgcaggtgtcgtggaatactactatgtttggggtgtataataacgacatccccttgtacataaagcaagaagatatttctgaaataatacatagtggtcaatatctcaaaatcttcgttttacaactgtggattatgtaagtcagtttacattacagggcaaaagaaccaaaagggtgttttttaaaaaaatatttactgataaggtgcgttttcaaaaatatttgcaaatctggtgcaacgggggccctatatttaccaaaatggtgctgtgcaacatgcctgaatcaggcatgttacaacacgcctagattcataaaccacaaaattcaaaaatgagagagaataataaaatgagaagtgagactcacaaaaagtagtcatttccaataaagttcaacaaatcataaagagagttcaaaagaagtttagaaaaaaatatccataaatcacaaaattcaagaatcaaattaacctgataccttatttaagaaatgtaagttcaattttactcattccattaataggtaataataggttttgtctattattggaatgagtaaaattgggtttacataaaatccaatcctaaacaattaatcaatatgttgttgcctattgttgatatgagtaaaaatggattttgatatcttaagtaaggtctgaggtttgatttttgaattttgtgaataaaaaatgtaatttaaagagaaaactccactaaagaaactaaattcaccaacaaagattagtcttttataaaaataatgaatatttgacaccaacagcacagtgaaaaaaaatcatgaataataatgattaatttagattcaatggtgttaaaaagagatcggacaaaataataagacttaattaataaggatttaattagaatttacaaaaattgtataatgtgtatatatatatatatatatatatatatatatatctgttttgctagtaacctgatccaggcatgttgcacagcaccagatttgtaaatataggtaccctcctgcaccagatttgcaaatatttttgaaaacgcaccttatcggtaaatattttaaaaaaaaacacccttttggttctttttgcctacattacagtccattacataactaattgttttagattaatgcataatttacttctctgtaacaaaataggcatatgaatgacttaagtttgcaatcggataatgcctttgtgtatggattccttgagccacagtccatacagagatctgggcaattgcaatttgaatccgaagactatattaagaaatggatacagagttcacagaaacatgtttacctagcagcgtacttgaatgggtaagtaaaaccgtataaatcaatttaaataatgtatgcactataataacttaaggttgtccagtgcagtgcatattggtaactggtcgttatatgtcctaaggacaatgttattgtgtggttttgtttgttgcacaataatcccgatactacttgaagggaattattaacaggtcaattgtaatttgtaagacatttactttattatttgtaagatatcaatatgttaattgtataatatgcatgcatgtttctcttaactagtgctttgaagggattcaatgatactcaaggaacaaaatacaaggctactactaaatggattgcagttaaagtaagtcatttaaacaatggttgatgtcttcaaaattacatttattactacatacactaatttccgtttaactttgaatatgttattgaatttagtgtaataagcaaagaggaaacactgagtgtggctattatgtcatgcattggatgtcaacgatattacaagaaggtttcagggataactgagagatgataattttatttgttatacttgtttttatttattattatgtgtgttttattatatcatgcagtattttactaatcaaagaccattggaacatgagagattgaagacaattcagattcagtaggcaagattttatcttagagttagaaataaaatactaggtggttaaaaagggattttaacaattgtatatagtttaattacaatcggttatagtaaatgtttttatgtattgacattattgtttttacttataattcatagatgatttgtactgtattgtgaaactgtctggattgatctatttttcatttgcaggtttaatttgggtaaaattttaaaaacagacagaatattaaaaaaaaatcgatgttgatttttacaaaactgatgttgttcaaataaatcaacatcagttttactaaaaacgatgttaatatgtgcataacaacatcgacttttgtgaaaattgatgtttttgttcgtaaatcaacatctgtttttagtaaaatcgatgttgatttcacatattttacagttttttcctttaatttcatattaggagacatcagtttttttcagcagtttgttctgtatcttggagattaggacatgtatctgttggatgattaggcacacagcagataccacacaaccttggttgattggctttcaacacattcggctgttgaccaatgacaagttgtctcacaagggatgttaattctgtcagtttattttccagtctctagttatcagcaaccacagaaacttcatttgcaacagccttggatggtgcagctactctagtaccaaattgttgataatttgctgtcatgtttgaaatcaattatcttgcagtaatgtgagttttgtccattaaagtgcctccattggctgcatcaatcatattcctgaccattaacatgaaccattcataaaaatattggatcaataattgctcactgatttgatggtgaggacagatagcaaacaacttgttgaacctctctcagtactcatataatgtctctacaggtagctgccttatatcacagatttctttccggatggaagttgttatggatgtagggaagaatttctctaaaaattttctcttcatatatgtccaagtgttgataggatttggttgaatgtacaaccagtccttagccataccatcaagagagaatggaaatgccttcatcttaacataatcctcatgaatattatgtggtcgcatggtggaacaaactacataaaactccttaagatgtttatgtggatcttcaactgcaagaccatgaaactttggaaacaaatgaattagtccagattttagttcataactgacctctatctcaggatattgaatacaccaaggttgataaacaacatcaagtgtagccaattccttaagagttcgaatgttgtcagccattgtgtcaacaacaatttcaaaatcagaatgttcaaaatcaaaaacagaagattcggaaacagaatgctcagaatgcactatactattatccagaactacgcttttattatctctgctcaaattgttaaatgtcttatctatctcaggatcatatgaatgcaagtcggtggtttggacctagtcatgcacagttcaacttgtcagtgacagaaatcacagaaataacagacaactactttactagaacattattaacaatatttgctaaaatgatatagaaaatggaaaattgccccaaataattttttttaaaattcaaaaacaccacaataaatgtcttaaaatcatttttgaattttgaatttttttaaataaaataataataataataataataataataaataaaataaaataaaatttaaaaattagcacattaaatgtctaaaaattattttttgatttttgaatttttttaaatctatatctatcttctatctatatttatcctctatctatatctatctatacattatctagaaacaattcttttttgtagacggatgcaattatactatactaatatcaattgtacctgtactattatctaattatcagtatattaaagttgacacacaatgaaccgtatccctggaaacgacgccactatttataacgactgttaaatcgttaacaaatcaaataaaactaagataattttgtagcacaagattaatctaggtcgactcagagttacagtccaatttgattcttgacttaatccacttataaacagtagggggatttatcaaacagtttgcaaacaatgaacaaaaattacagaaacacaaacaaaaattgaagaaaatgtaaaaacttacagaattgataaaaaatgttgtaaaatatattcaagaatatcaatccaattcaccaagccaagcaatgcaaattatcataattatcagataatgatcatattatgaaagttcattcggtatcattagaagcggttcaattgaattaattcttaaatcaatcaaaatcacaaaccggattgaaatatcatccaaacaatttatgattaaaattcaaaattaggaaataaatttataacctaatttgttttcaatcctaaacatattcataatcatgaaaattgaaaagaggattgaagaagaagataaacattcacacagaaattagaataccaaagcagaactcaaattctccttactttgactggttccttggtttgattgattttttagccttccatgatcatcatcagtggaagagccacaaaatttgtgtaagaaaatagaagaacgaagatgaaagaaagaagaaaaataaaaaacaatgaagaacaattaagagaaaaagagagaaaatttaaattatgaaaacttgcacaagaagttagaaattctatttttgtgtctgttagtaactcctagccacattaatatatagtgattgaatagaatgaagggatgaactttgattagacccatttaaactaactaattatgctaattacatcaatcgaaacccaaacttgtagctcaaaactcaaatagagaggttctgactttcaaacctaatttgaccctcaaatcggcaaaattagctcacgcttatctttgacaaaattatatctcttttccttagctttcgagagactactcatattcttcatttagagttctgtagaatcctttaggttctacacaagaaagataggtcaagtaagtacaaaatctgaaaataagcaacaattattaattaagcttaattatttgtctaagacaaaaaatgagttaaagtgaaaaaaataaaaatttaagagaaatcaaataagctaagaagaatagaaaaatattatactaaaatcgttcaatgagtgttattttaacatcgattttaaaaccgatgttaacattgatactttcaatgtcggtagtttcaacatcgattaaaaatcgatgttgaatgtaaaaaaaaatcgatgttaaatattatttttctagtagtgtctattacatattaaatatttattttgtattaatatatcattattttatattatttattataaatatgttactattttgtttttagaccctttaaatttattagtcttcgtaatttgtttctttttagttttttttatatatatatttttagtcactttttgattacaagacattccataacgtcgtctcttgctgatgttaggagtctttaaccaaatcaactactagtagaatttttttacagcagcgactaacgataaaaaaaaattcaagagggattttttttataataaaattacaaagattaaaattagaaaaaaattataagaatcaaaagtatatttatgcttttcaaaacccatatataacattttgtaatcaaactaataagatatggacaccatacctatttttttttattaccatattattaatatagatatttatcaacttttttataaataatctctgttgcacatcctaattgatcacttatagttgaatctttcttctcaattatgattttttatcaataaaatttaaattcaagacttaaattaaaggatcaaatctaatatattattaggaccaacaacttgttggtagacacttcacctattaataatattagtttaactctctcctttttattgaatatttgttttttctgttgacttaaacaaatacttttccgcaataatttgtacatttttataactaaaaatagtttgtgttctttaaataatttagaaaaacatagagttaaattcaacttttttcccgtaaggtagatagctttaactttatcctattaaaattagcacgctgcacagaagatttattgcacgtgttttagcataaaaatatataacacaatgatgcatgcaataattctcaaaaaaatattgtttaatcaaccttgaattgtttacaacttgagagagaaagaaaaaaagaagaaaaaaatgattgatttaattaataaagtaatatgataagaaaagagagagagaaaaaaaatattaaatatttttattatcagaatataattactctcataattcttatacgtactttgtcgagagattagggagcagtggatggatccactcattaggggtatgaagttaattgtcttcacatactaaatttttttgcttgaatatatttaagaaatacttttttgtttccataaaaaaataaatcttgtctggttcccacaagataattttataagtttttaataagataaatataaataattgtaaaagataaaataaagaataaatcgatactaattttatccactttatctttttaaattttactgttttaaattttttttattatcatttttaataaagtttatataattttttgtttaaaaaatattaaaatattttttcttctctaaaaaaaattggatccaccactcagcgtgacccttttaatttatataattgattaattgtttggagaggaaagaaagaacaataataataaaaatatatcgtataatgtattcgatccagcttgcttctgtacttcgtggtgatgatctgtattttatacagagatgatccattatatcatactctatatttttttaagatacttgttttttcatttatttgatatcagtgtaattatcacattaggctttcgagtagtacttaaagaattatgggattaatatttaatcgaatttaatcacacttaaaatttattattcttttctaataatatattttatagagaattgaattttattttatttttttataaatattacatatattatcagttaaattacacttattaaattacatgatacttgttttaatgtgacacaaagagaataagtgagtggaaattagaaaaacaaaagcattgatttttagtcacttctactgagaaaacgttttgaaatagctgccatggttttcaataattgtgcttctgtatttttcttcttcaatcattatcaccaaatcattatttggtatctaggtactgtagagcgggggaatcgttagatatacgtgattttctagcaataggtcgcattgcacatcatttctatataatacctttgtacattaactttttgcttgaaattaacttttgtgaattatgacatgcatgcatgtctgtggatcccttgtcatttgtctttgaaaaaaaaagagtcaaacataaagaaataattgaatatgacgacaagtatcaagatttcttattatgtatagcttcaaattttccagaacctagggtagtgacatttgtaggtgatgtgtatcaataccttcctaacgttcagcgggtacacaaatgcatgaagattgagatgacagccatattctagcatgtgacagttagattcaatggcttggactacaatacagagtccagctcattgttattcatatttttggtgaaagaaacaaacagacacagccagatggtgaccttaatagttcactataatagcttggtgatgggacactgcacagccccattttcctcgatatgcctctttttttctcgtgatatatacaatatttttttatcgaggataaataattatttttatttttaaatatataaaatactaataaatttatcttcaaaacataaaaattcaaatttaaatctaaaaaaattataaaagtttatttatctgttaatttatattccttattattaatgaaatattttacgtggtacaaaggagtaaaaatgtcacaagatatttgaaaatttctattggaccaaaatgttaataaattttcattagactaatttgtcataccttaattttgtttcatttaaggataaaatataatttaattttcatcttttcatctttattttattgttgtaagtataacattataataaacacttaaatagggaaacaaatataataataaacataatattgattaataaacataatcagtctattgctcttaaatttttaatgtgataatactttatccaaaatatgagactcaaacaaaaatacatatccattatgttaatcctcacaaaaaaaatgagatccaacttgattttgtcactacctaatactgtcgtaataaaaatttaagagcaacatacaaattatgatgtttattaatcaatattatgtttattgttatatttgttctaatttatgtttgtttcctattttttaagtgtttattgtaatgttatacttgtaacgataaaaaaaggagaagatgaaaattaaattatattttactcttaaatgaaatgaaatttgagatctgaaaaattagtttaatgaaaacttattgacattttagtccaatttattcaacattcatgctggcgctcatttttgtaacatttttcgttcatatgtatcatgtaagttttgtcattaacattaatggatgcaagttaacaaatggatgaatttattgcatttttttcactattaaagactaaaatttgaatttttcatctttcaaaaacaaatttattagtattctatatatttaaggatttaaagataaaaataattatttgcccttttatatatatacccaccgcttcatcttttatgttgaaagggttgtcaatcagttgtgcaaaagagagtaagaaatgtccggaagaaaactaagtttatgaatgcttatgggagttttttaagtaaataatataaataaaataattatttccacaaatcatgcactcaaaaacgatttatcaacgtgcatagcttttttctttttaagtaaattaatgtttattttagatacgtgtagaaattggttccgattactaaacgtacctttgttttatatatatatatatatatatatatatatatatatatatatatatatatatatatatatatatatatgcccgatttcaagtctctaactccaactcaagagattctttttttttttttctagtaatgttaatgctccaaattctacttgagcgtctaaatctgggtcgataccagcaaaaacatctttgaacaaagttctagcaccatgccaaatgtgcccgaaaaagaatagcacgcacttggctacctagcgtttaccgtgggcacgataactggcacacaagaggtgcgtccttcccgatcctctcgtactagggaaaggtcctctcaatgctctaacgcccacatcggatatggaccgaactgtctcacgacgttctgaacccagctcactatatataaaacaccgttatgagttttcttaactgtttttttttatttcttttattttttttgcttttcaattatctatatttatgttttttaaattgatttttttttcatatgttgtttttaattttttgcatattgtttgctttatcattttttgaagagttaaaatatattgaaattctttttaaaagtgagtaatgaaatatttcaattaaaatatagaaagactaaaatggttggtttgaaaaaatatgaagacaaaaataaatatgattttattctttatatcttcattttgtagtaattttaccaaaaacataatagtaactaacaatagtgactaaaaacctataaaaattactctcataaaaactatagaatatttgcatacctaaaccaaagaaaaaaagaagcagaaatatagagttaaaagactaaataaaccaaaaataattcataatcaataaataaggaattatctagagttgaaatcctttgtatttttattttattttattattaaaacacatggttgaaataaaaaaaattaaccaacaagttgaattgaactaaaatatttaaattataaaatagatataaaattataaatagtggaacaaaatatttaaatttgaaacaatataacaaattttttaaaatacaaagaatatgacataaacttaacgttgttggcttgggcctacaaaataggagcatttgttttattgaatggcatgggatgcgacacattgaacatcattttagttgatccggttttcagatattcattttggtatgtatagagaggagataggacaactcttagaattattttttctctaggtcgaggcagattcttgactcatgacacaacagccaatacgcttcgttgcacaattccccaaacaatccttgtacactttgaagaaattttccaatatatacacaagatgtatgtagttcttgtactcatggtgagcattcttacaagcagcagcaacataagaacaaaacatgtgcactttttggagtttgccacagttacattacctttccatctagtatgaccgtgaaatttctagcgagtcaaacctctcttgggttaattatctcttggactaagaattgtgtgtcgcatcaatcgaactcaacaacaatgtgagtgttggcctttctctgtgtgtcttccatgatcttgtttagtacttgcatacaaacttggccagatgtgagcattgttgcgacttctttgccttttcggttgaacaatgcattacagcttatatatattgattttactagtgcacttattagcatattttgtgttttcttgagtaccaaattaatcaacttagtaagattggtggtcatgtgcccctatcgttgcccaccatcccatgcaagagtccacttttcttgcgaaatctcgccgagctaattaattactagaccatcatttgcttcctcccttagattgttatagtagtgattgaacgtaggctatgtccttgcatatgctaactagttataaacatacaatttcaatattgtgaataatacaagattaaatgatatttaatatgaagagaaagaattttggcactcactcatattggtaattagtcttttgatgtcattgttcttgaaccttctcatgtaattctttgcaatgtagtgaatgcataacaaatgcacaaaattttgtgtcgtccacccactaccatattttgagtaggcattttttattaactcgttcctatctgaaatcaagcatagaccatttcatttttgttttatttattcaaacgtcaattacatagttttcggatgccttacagagggtttgagtcatttatgccaaaacaagcatacaaggattccaaaatacagagtgtttgtatcattttaatttgtttcacaatagtagtatgacagcaaattgacaggcttatgctccaatttgatctttgtcaagacataccaaatccataacataatcatgacaaactccatcatattgacatgggaagacacaatgacacaaattgggcataggagaatttatatatgttaatcggccaacctattcaaggacatcttcaacatatgagtcattacatgaactggtactgagaaaattcaaggacatcttcaacatatgagtcatctttttgttgttgttgttgctgttgaactttgtgaactttatgttcttgttctttctcatgaacttgctgaatcttttgactattaggtttagattcttatcaccatcttcttcacttgagtcttctcctttatccaattggaggatgcagctttcaaggctatgcttttgtgtttcttatctgcatcttctgcatgtgttagttgagacatttctaattcatactcaagaagcttaccaaataatgcaaccatggacattttggagagagacttttgtaatagttacaaacaactaaaaacaaatttacaatcaaagttaatggagagatacaacctgatgatccaatgaaaatggtttaccaatcaggtttggaaacaaatttcaaaacttcttctccaaacacttcttttgaaatcttgcccaagaagaaatctttcaatgcacaatgaagatttagaatttgtgggagaagagtttcaaaactcagaatatcctttctcactttcagaagacttttgaaaataatgaaaatttcaaagagtattgtgttgtgattttcaaaagaccaaatagctatttataacagactgttgtaattgaatgtaatcgataaaattgtcaatgtaatcgataaaaaccactaatgtaatcgattaaaaacaaattcaatcgattaaaatgttcttcaattttttggaaaagatatatgagcaaaataatcaattaaaccgccatataatcaattaacatagaaaaatttgttttccaaaacgcaccaaataatcaattaccacaaatcgtaatcgattattataggaagacattttggtgactttgtgaagtgtaatcaattactattcttcagtaatcgattaaagtgtttttgaatctttctggaaaatattcatgaggaatataattgattaattcactatgtaatcgattatcataggaagtcatatttcaaaaacaagtcaagtaatcgattaccaccatatcgtaatcgattatcacaggaagatttcaactatgatttgtgaagaataatcgattaccatatagttgtaatcgattaatatgttcttcaaagcttaactaatagattaccattagttgataatcgattaaaacagtacgaaattgtttttccaaaacaagctttgaacactttgactttttcaatgcaatcatgaatactttaaatctttttcatagatcatatgtcttttgtaaaactatgattgcaagccaatgaatgatgtttatgcaatgcaaaggatcaaaggatgaactcttatccatctaagaattacatatgtcttcaattgaatgacatgtaaaagttaaaacttatccaagatttagatcctcagcatcttgattctcttcaagctccccatgtatctaacaatcttccctttttgactttgatcatgccaaacttcaattaaacatgttgaaactttagtgttctttttaagggatgatttctaggagctttatacttgatatatgaaataagatcagcctctttgccaacaacaaatgtcaagtatactttgcataaacatttataattcttgagattgctccccctatcttaagtaatttttatcatttttctttattcttcaattaataaaacaacatcctcattcatatatatatatatatatatatatatatatatatataaatatgttcatttgatctcatttttctcccgcttttggcttatcaaagtaacaaggatatacaattataaaggaataagcaaggaagagataaccaacatgaacaaagtttatgcattgatagaaaggatgtagaaacataagagagacattaaaaataattgctggaaataagagaagcaaataacaaaggcagaagcaagaaattacaaccaacaaactagagattatcaaaatctctaagagccatcctagcatctatcgttttctagcctagttgtaatttcttctaaggaagcattaacttcaactttatgctcatgatgcagggctaacatagaatccatcgtttgcatcatcagtgattcaaagggagtccactattgtttagcagggccagcctcatcatctccttcttcttcagctcctcctttttcagcagcatcaccttgtggtgcttgttctccaaccatcaaccatccatttggagtccttttgaatatgatctttgaggaagtgatgtctgatctctatgtgttttgtctttgagtgcatgactgaattatttgataggtttgttgcacttgtgttgtcacatagcaggggaatttctttcaactcaacaccaaaatcttggatttgttgcttaagctaaaaactttcagccgctatgtattcagcttcaactgttgagagcaacacatgattgcttcttgcaatgccatgaaattaatgagcttcccaacaagtggtatgttccactggtgtttttcctatcaagtttgcatcctgtaaaattagaataatttcttttacctacatgtataacctcaccggtttgaccatcacatatcacacaacaattatcattgaaggaaaccttgaatcttttattacatagttggtttatacttaggagattgtgctttaaaccttccacataaagaacatttctgatcatggttttaaagttgtctcctatatttccttctccaactatctttcctttgttgtggtcgctataagtgacaaatcctccatctttaagagacaaatttgtaagcatggacatgtcacctgtcatgtgtctagagcatccactgtcaagataccataatgatgagacacacctgcaacattcaaattaagtggcaaaggaaggtacccaattaaggttgagtccataagggttagctattttctttttctttggaacccaaatgcaatctccatttggcacatagaatcttctagcatagcacctatgagatgtgtgacctttcttcatatagtagttacaagtcacagattgtgatacgatattgattactctgattagttaaagaattttttaaaagatcaagatcaaccaattcaccccctcttggttcttgtgtgttgttcatactgttttcaaatctcatttgttatcttaatgtgtgtgcctatgtggcacctctaataatgacatgacagttgtgtggttgtcatgtgattgttatgtgtctaaaagttgactttttaattttctttatgaacttaataatttgttgtcattttaatccttgaacttaaccacttattgatattttggttcctaaacttaactagatattgttattttggtctctgaaagtacttttgaatttttaattaagtttcatgctgcatgtaaattattagaatagtcaccaccatatccccttattttcattccatatctgccatatttttcactttcatctttcatatttggtagttcatcttgactttcaaatccaccacttgcatgcaaagttcaccatttattcaactgaaacataaattctaataggaaaataacacaaacatcctaaaacactatttatctttttcttaataagcattgtctagcttctttaagaagctacattttattcaattaaattttttcaaatagcttcttcaacactcttaagtaatcattacatttaagattctttgatgtttatatataccttgtagtagtagtagtagttcatcaaaacaacctttgttgtttgcattttctgataggcttggtcctcttagtttcataatcgatcatgtgtcaatcgatcacatggatcttatgccacccctcccacttacgccttcttcatctttaaaatttttcactctctacactccaaacataatcaaaagaatgaaaaatgacacgtgcttcgtgtgctactagagggtcatgtcctttattattcaaaccttgaaaaccaatgtggaaattgcaaagattgaaaaaatagggtaaaatgtatcaaacttgccccatcaaaagggtatataaggaaatggttctaacacttccattttttccctttcatgattctcaagttttttttaactatcttttcatgattaatgttattccataaattagattaattaattaatctaacatacatacacattaatagcatataagataataacttgattttggtagaagatctgatttggaaccttataaaattttgttagcaatgtctaggatttacccgctaattactcataaattagtttcatatttatagtataatttaaaaggaaaaattgtgagaggacggtgaaaaatatgagggataaataatagaagggaggctatatagtaatgtctatactaataatttacatacaacatgagatttaattgaaaatttgaaagtgatttcaagaaccagaatgacaatatgttgttatatttagagaccaaaatgtcaataagtggttaaactcaggggctaaaatgacaacaaattgataagtttagagacgaaattgaaaagtcaactttaagactagcgacagtcacgtgaatgacatgtggcagccacgtgaatagtatgtgacaaccatcatgtgtcacgttatcaccaagtgccacatagacacacactttaggaataacaacaagatcaatttatctcactttttgcatatttgggaattcaattcaaaatttccatctttcatgaaccaatctgtcagtatctcacacttacaaggaccaaaatggacatttgccctttattttttgagttctatgatttttgtcttcattaacttggggtcactttatttgttttattttctttctaataatcacaatcttaaaattgattattttatttgcttaaaatttcttttttgaaattaaatatattatttttcacacccaatgagtatatgatatgatccttgttaggaacatatttttttttacagatattttttagttggttatcttgtaacaagaattgaagtcaaaatataatcaaagggaggaggtagaagaaaaggaaaaaactagcacaaagcaataaaacaattatatcatcagcgcaaacaagaacaagatgactgaaataaaataaaaaataaaaagaaatggacaaaatggaatagacgggaaacaaaaaggaaggtgtcacactctaggagagtgttaagtcaagagagacatgtcctcaaaggtatgaaatcctttgataagattcaaacgaggttatgatccaagaaccaaaaagaggagtcaatatgctctactcaaacacaaatgagtaaaccttaaatattattcgactctcaaaatgaaagggattacatctctattatagagtttattccaaggttctagtcacacaaggaggctaatcctaattttaagaaacataaacaaaaggcccaaacaagcttaattaaggccaaaaatataatttaaattaaattgaaaagaaccctaatctagaattaaaacttgggcttctaactagcatcaaaccacttcattacaattaaaattagtctgaaaacttaataaaatgaaatggaaattttgcagacccatgttggtgcacattggtaggttgacattcttcaacttgaatcaagtgcaccatcatggacactcttctcccattttgggcttaaccatgtaatgtgttgataacctctaaattctccttcgatctctatactcttgctcacattggtatttctagcccaagcacagggtcaaccttttgagttcttcctttcttaagttcttttagcccaattgaggaatttttcttcttatgccttccatcccttttgggaaccttgcttgaccactatcattttactggggtgttatgttttaaagaagaaggatggaaaatttttcattcaaaaagaaatattctttaatttgacattcttttaaagaaaaataacaatcctttgtacatgtttaaagaacaaggcatgtgtactttttggaattttccacagttacatcacttttcatccagcttgaccatcaaatttttagcgggccaaacacctctcgagttaattgtctcctgtactaagaattgtgtgtcgcatcgattgaactgaagaataatgtgaacgttttcctttctctgtgcatcttccatggccttgtttagtacttgggtataaacttgcccagaggtaagcattgttgcgacttctctccctttttagtagaacaatgcattacaccttatatatgttgatgttactagcgcacttattggcaaatttcgtgttttgttgagtaccaaattaattgactcagtaggattggtggtcatgtgtccccatcgtcggccaccatcccatgtgagaatccacttttctcgtggaatctcactgagtcaattaattactctatcactctctacttcctcccttagattgttgtagtagttattaaatgtaggttttgtccttgtatatgctgactagttaaaaacatacaatttcaatattgtgaatagtacaaaattaagtgatatttaatatgaagagaaagaagtttggcactcacccatattaataattagttttttgatgtcattgttcttgaacctcctcatgtaattatgttcaatgcgtcgaatgcagaacgtatgcatagaattctatatcgtccaccactatcacatgttgagtatcatttttattaactcgtgtctgtttgaaatcaaacatagaccatattgtgggtgacatgtctttttgtggaacaatcattcccagttgtcgtagatgttttcaatggccttttgctttgccaaccatgctttccagtacatggtagtgtatccttaagttcttttgaaagaatgtctgctaagggcatgaaacgtatgctcttaatttgttttgattatttaaccattgtagtgtactacctaattggcagatgagaaagacatattgtgtattgtgtttgcaaagttgaaagaaagtaatagagaaataaagtgtttgtacggatgtgttaaatgaaggtgaatatgaattttatatatagatgccagggttaagggtttataacctagggttagggtttgaagcattggattccccagcgtaaagaaaaagtgtctttaatgcactagcgtaaagcaaaagtgtctctgacacactaacgtaaagcatttgattccagtttattttattggagaacgatttcttattactaaaaaatatataataagtgataaattagtttggaaaaaaacaattttttacttgttacaatgatttgtataattgatgtaaatagtttttggggtgtattatttggataaataattaatttatttatattaattagataaaaaaactctagtttaatcatgtttatacgtgtgacttaagtaattatattaacatatatttaaaaatattgtcacggttaacttaaatagataacttttgaataaaagatatttttttccttaaaagtgcaaattgttttacctaagtccctaaatttctcctcaatttaagttaattttgcgcatattgattttatctaaatttaaggtatcctttgggggaatggaaaattgacacttcaattattactttatattttcttattttgagtgcgtgtgttcctcacgtagctaacttttgtaaaataaacgacataatcttctagataactaacgtgataacagaatactcctgaatacccatgtgaaattaagtcttattgagcttttgcatccattgaaattaagccttttttcgttttttaagcgatataaacagcgaggatgatttttcatcggtttggtaaattaacagaaatattcctaagtaaccaaatttggaggtgatgagcgaggagagccattaattggaatctatcaatcacaacaaaataatttaaagaaaacaatctgtccagggaacatgaaaaaaaaaaagaaagagagagagattatcttaaaataaaagtcaatttagaatatatgatagaatatcacacaaatgtgcttctttggaaaggaaaatatgaatcatagtttttgtttttttcaacggggcacagcgtgtccgtcctgcacagcatatctccggacccgccaccaatttttgcctccatatcataccagctacattatttcattgaggaaaacaatgactgaaatatgagtttctatatttcaaaaaacttaaaagaaattgtatattgcagttatagacaaaaactgagaatgtggtgccactagttaaaatatttcaaagcatgtttgttaattaaaagaaaattccgtctctttatctaaaactttagactatatttccatcatataataataataataataaattcataatggattttccaacaatagtactacaaatttctttcttgtaaactaataaattctacgctatttgtttaattttaataattataaaatttcgagccgggtaaactaggcccatcccagattctttagaccccctcagccaagaacatatgagaaaactccaaactccaaaggtttaactagagtaaatgggctgaaattctcaatagaggaaggcttttgttatatctacgcctcttttttttctaagtacaatcccatactatcaaatactcactatacctaaaatacacctatatcatcattctagaaaagtacatttcaaaatactatttttatttttatattccatatagtagtttctataatacaaatttaaaatcattccataatgtactttccattatacacaataataggatccataaagtactttctagaatactgtttaaatttttgtattttgaaaagtactttcggaaaaattttaataaataaacattttgcatctattccaaaatccaaaaagacaataatctcggtaaagtgtctcacaaagaaagtcttatattgtgtctatatcctacctctaacaatattacacatgtgcaaactatgcatggaaatccaaagcttgtgagaacttttcctagtttgtagcaagacaataaagattattaaaaccaagaaagtgacaaataaaggaatgttttgttgtcttggaagtaacaaatagagtgaaagagaggaaggattctaatgaaagagagggaatattttgttgccatggatgagtgcattgttggggggaagtgagtgaccgtgtgaggtaaaaaagagagtttgaaacaagaaggttatttaagacatttgggtttataaaagaaggggattgtatttagacaaatgggagtggatatagcaaatgccttgatgaatattgcagaataaattgggtctgtccaaagtaagggatcaaacattgaggggtgttgctattcgggccatcaattgctattttcatcctgcatgctaatttttttcttgcttttgtttcgtactttttgcatgccctcattaatataacaggggtgtgtttctgtttcatactttatcaaccccagtcattaatataatggaaatgtgtgtttcatactttttgcaatcatcttattaatataacgaaaatgtgtttcttttgggtatttaataaaagtgcataacaaaaatgtgttttcattgtgcagttttatcatacacccaactaaaatgtgattttgttgtgtatctcagtgacatacactatggaatcacatttccattgaacaaatatacgcaaaaaaatgcacctctcatagaggctaagaagacaataaataaggtaatgggagtagaagatgggtgttacggattcgagaaggcccattgagaattcaattcaaaacatcgaactgttgaatataactgaagagaagatcgtggaccttaatataataacagccaagaagatatggatgttagcagttagagatattggtcgattatatcagaagagatccataactgacctagaggtaagtcaattataaataagggttactttaagaggaaaaaggtacacaccactcgttctctcttctctttttcattaacactgcacacacctcaccccactggttgagtattgcgttgtgcatagtgatcatatttctagaggtatttctcttccatagataccttaagagagagcttgatccaataccaaaatcaccagcttccttactggacacacctgtttgtaaaagacagaacattggcgttgtctgtggtagaatgatggagtgcttttagttaaatatttttctatccttcttagcttaattgacttttcttggacttttatttttccattctaattcaatttttgtcttaggcaagtaagtggacttaattgctaattgtagcgtattttcggattttatgctcacttgacctatctatcactggaacatgaagagaagttgatgcatgttttgagaggccacaaaaaggccattggatggacacttgctgatcttcctggaattaatccttccatatgcatgcatcggatacttttggaggatgattctagaccaatgaggcaaccacagaggaggctgaatcccactattcttgatgtggtaaagaaggaagtgacgaagctactagctgcagtgatcatctatcccatctcagatagtacttgggtttcacgtgtccaagtggttcctaagaagtcgggtctcacagttgtgaagaatcaagataatgagctgatttcgactagagttgccaatagttggcgagtttgcattgattataggagactcaaccaggccactcgcaaggaccatttccctatgcctttcattgatcaagttttagagaggttggcaggtaaatcacattattgctttcttaatgatttttctggttacatgcaaatccatattgcaccagaggttcaacataagaccacattcagttgtccatttggcacatttgcttacacccggatgccttttggcctaagcaacgcacctgacaccttccaaaggtgcatgataagcatcttttctgatttattagagagttgcatggaggtatttatggatgatttcactgtttatggttcctcttttgatgcatgtttggatagtctctctagagtgcttgaccgatgtattagtactaaccttgttcttaactttgagaaatgccattttatggtgcatgagggtacagtcttaggacatttggtctctagtagaggtattgaggtcgataaggccaaaattgatgtgattacctctttgccttaccctgcttctgtgcgggaagtacgttcttttcttggacatccaggtttttataggagattcattcaggatttcagtaagattgcattgccattgtccaaacttctccaaaagaacgtagactttacatttgaccagccttgcaaagaggcatttgagggattgaggaagaagctgactacctctcccatcatgcagccgccaaattgggagcttacctttgagctgatgtgtgatgcctttgattatgcacttggggctgtgttgtcacaaagaattggtaaactatcccatgttaatacttatgcttcatgcactttggatgcagcccaagttaactacaccaccactgagaaggagcttttggctattgtttttgctttagataaatttagatcttatttgctttgctcccatatcactgtctttactgaccatgtagctttgaaatacctgttgacgaagcctgatgctaaacctagattgatcaggtggatgcttcttcttcaggaatttgacattgagattaaggacagaagtggtgcagaaaacttggttgctgatcacttgagtaggattgaaggacctcttgagtcctttcccatttgtgataattttcctgatgagcatttgatgcatttgcattcatcgcatgtcacaccttggtttgctgacattgttaatttccttgttgcatctgttgttccacctcatgcatctaggtcccaaatatataaacttaagattgatgctaaatattatgtttgggttgatcctgatttgtggaggtttggtagtgaccaagtgatccgaaggtgtgtgcctgatcatgaaatttagtccattcttcagttttgtcacggcacacctaccgaaggttattttggtcctcagaggacgctagaaaagtattagactgtgagttcttttggcccaccttgtttagagatgctcatcactttaccaccacttgtcagcagtgtcagagagcaggagtgtaacaccccgtgtgcacccggtgtattaacattattatttatatcagaatagcgcttaatcactttgatttaaaaaaacttttgcggaagcataaattgaaaaccatatttcttgattacattatgtatggaacataaaaacatctcatcacaagacaacacaagcccctgctgatccagaataacaaaaccataggcagatcaacataaatatctcaacagatataataaggaggaaacatcattacataacataaactggtcatgtacaaagcatcatctgacactcgaagtgtctatacaaaagaataggcatacatcgccttgatctcaaagatccttcctcacacgagggcatacatagcatatacaaagcataatatatgtacacacacacatatgttccctctacaggggtacaaaacatcatcaaaatacatctgagccacccagctctccctgctgccgcacggccaagcagtcactgtctctactggggcctcccgcccagagaccgctcctctctgccagaagagtcacctgaaataacataagtcccacacgaggtgagataaacatctcagtaagctcagggtccttggaggcatctcctccaccctggctcactctccatgacacacgtcatcaaggcatcacaaacatactggccacccggctcggcctcctggccctcataacaatacaagcaagtcctcttgctctatgtacggcgtatcatcatcaacgcctaacctcagtgtgagaccggaactcacacccgtgtcatcccatcgggagctaccccttacgcatggacgcacgtatatggtacctccgagaataggcaatcaaccgtgacgggacacacctatctcttggtcttaggggatcatcatcacccatgagtaaaccaactaggaggaatagccgtctcctagggaggtccatatctatctaactggccagaagatctaacaacaagtatcatacatttctcaagcataaatgtaagcatacatatcattatgaggatgcaacaaccatcaatgaatgcatcatgaatgcaaccatcactccctcgaagtgtggtggaacacaacaagtgggaaacatccccaagggaccaagaagccgagctctgcggttctttccctgctccgtggcctacgccactgacaccctcagtgtcacgccctaacaaggcatacaatcacatatcaaacaccattctatccgtacaaagcatatatctctagcaaaacatacggaagagcataagttgctgcataaaattctgcagattttacacccacttagaaaaatcacaactcctagtgggaagctcctaaaatcacgaaaatttagagtcatcaagatatatctcttatcttttaaacaaaactggtttcatcaaaaaccatgaaccacagcctctgcagcaaaccaaaaaccagaactgtcacgcactaaaaatagtgctgacagcagcagacagagttatgatttctgcaaaatggccctctgcagcagaaaaatctgctaaaaacagagtataacagcctgttataactctgcaccacaatttctatgagtctccaaaaataacacgaaaattccagagcaaacctaactctcttaactttcaaatggcactggtttcataccatttggacatcaatagctcctgctatggacaaaaaaccagaactgccgaaataggtgttcttggctgtcatgaacaagcatgcatgatttatgcatagaacaccatatcagcttaaaatcaacttctacccactccaaatcatacttcaaaactgccccatcctctaaaactcagcatacatcaatctcactccaaaccctaacctcaagaatcaaggagaaataggaggagatttcaaaccttagagttcaatacaccacaatggagggtagaccaacactctacggcttccaatcacggttccgcagcgccgaacgacaatgggcagattcaaaactcactcttttctttaaatcaccaacacccaaggctcaaaaacaacaaagaacaaagaagagggctttctttcttgcttgttttgtgatttcaaccactaataacgtaaaaatggcaagaacagagcttgggagtggagagaaaatcagaggagaagaaaagagaaggagaaataggcacaaaacatgttctgtccctttttaacaagaaacaggactaactacacccgtacctccgacaaagaccaaactgccctttcgtaactccgtttaattacgtaaatatcactcaaactaccttaattaaatttagtgatattacaaggaggcacaattacacatagacatgagatgcctcagcaacccattattttttgtgagattttttatgtatggggtattgattttatgggtccatttcctgtttctcatggtttttcatatattttgcttgttgttgattatgtttctagatgggttgaggctaaggccaccaggactaatgattctaaagttgttgtggattttgtgagatccaacatttttttgcaggtttggtgtgcctagagccattatccatgactctaggattcttagaaaggagttccatagtggccaaaaagtgttattgtttaactctcgccttaagcttatttcaagtaaacttcgatctaggtgggatggaccttttgttattactaatatttttccccatggtgcagttgagattaaaaatgaagctactggcaaagtcttcaaggtcaatggtcacaaactcaaagcattttatgagagcccacaagtggaggaggagatggtggaggacatctctttgatcctaccaattttgcgtgaatgacattttgggagtttccttttcccttcttttatttgttgtctctttgttgcatttctttacatgcttacattgaggacaatgtgcatttcaagtggggggtgaaggatcctaaaaatctgtttctttggttattttctgttttctgttctttatctgtttacgtttattgctgtctgtttttcattgtctgttggtttttgttttctatttgtctgtctgtctgtattctgtttgtctgttttagttgttgagtctgtatatttttgttgtctgtttctatttgttgtttctgttttgttgttgtttttattgaatttaggcacttttcatgtttttcataggatttccaacttgtataaattgtgagaaatgttaaaaagttggttggattgagaggtttcatacttgatgtgaatcattgttgtaattgttgaagtgataagtaggcttgagaaataaattttaagatgaaccatgtgtggtagaattatgccttgtgagtttttgagccttgtggatgtgttctttcatgtgtgatttcaccctagtgctagattactctatgttttgtcttgcctctgttgacattccttgttgcacatgctttgattgagatgatttatgccttctttcttttagccactagccaaataaacctatccttgtgttgatatccattgtcaccatctttgagcctttagccttttctttcttgtttagctcattaaaaactaaaaaagaaaaagaagaaaaatggaaaaccatgttatcctagctttagggagaaaaggggctttagaattgttttgggagtgagtttcaaacaagtgtggggtatttgtattttgttttgatttgaaagagaagaaaagaaaagaaaagatagagttcaaataacaaaagttcaaagaaaaaaaagaacaaaattgtgtataagcaaagaaaaagaagttcaagcaaagaaatagaaatatgcaataaaaattgttgtgattcattttcatccttgtaaattcttttaaatttcatcttattgtttctacccttcttttatcttgttggcttgctccccattgcccctcttttctcttaagttttaacctaaatatccttttcttatccacctttacctaagttattcattacaagctaataaagtccttttgatcttttgatgcatgtgtatttcaagttgaatgaattataggcttgtcaatgcttggatgtgctagttacatgtggtgtttgagtgtaaatacaagccatacacattatatgaggttgagtgtcaccctttgagagaattatatcaccttggtgcattcttaatcctaaacttgactactttttcactttgcactttgtgatcatgttttcatagattgtttgttacctcaatattattcttccatctttcatctctctcactttggtgcattgttatgatccattgaaaaatatgtgtaccttgtttataccctttctttaaattttttgtttactttagtttgaatttttctcttagtctttcttttagttttgcccaggagtgcaaatgtttaagtgtggggtattttgatggagttcttttagttaaatatttttatatccttcttagcttaattgacttctcttggacttttatttttccattctaattcagattttgtcttaggcaagtaagtgggcttaattgctaattgtagcgtatttttagattttatgctcacttgacctatctgccttgtataggacctacagagctctacgaaactccaaatggagtgttctagtagtcccttgaaagataacgaaaagatctacatgtttgacgcaaaaagtcaaggctaattctgccatttggagggtcattttgggcttcaaagtcataatcactacacttatattttgggctgcgaatttgatttttatggttgtaaatagtaaataattagaattgatgggtttgttcatggcccattattttcttcatacttagtcactacatattagtgacattggatagattttacacattaaatttcatttaataaaaacagttttacatttctctcttttaagtttttaggattaaaaccattgctcttattttctctcaactgttcttccttgtttttcattgttcttcattttcgttttgctgttcttccattttcgtgcaatcattccaaaacatggtccacctcgatgctgtgtatgtaagcgatgttgtttcagactctgcctcgtctcctgttccagcgggacgggcaattcctgacactcatcaactgaacctgcctcatcatccagtggtcatgtcgacccttgaaccggagctagccaaacatctcgtgaataacgctctaaattcgatcttagctcgaatggagaatatggagaagatatgcccttcaaaggcaggaagacatcagaaatatcacgctccagatagaggagcgtaatgcggaatggacatgcgaagaagaacaacgaatacaacgcatggaacaacgcctaaaaaatatggagaacccagtccatagtgagaatcatggacaacaggatagtcatgcagtcatgattgggacaaaccaccaagctagtccggtcccggttgttccaataaatcaccccgcggaggcacatgcgattctcgttaattcggaaggaccagtgagccaatttgaaatcagaggatcatctcgggtgaacgtttgaaatgataacccggtgcatcaggatagtgagaacatgatgcatgcacaaccggcacctaccaacaccggggtgaagtagacaagtcaagctcgaatgatagcccagaatcaggctattgaaattgcacctcggataaggatggaaaggggagtgtatcggaggaaatacagtagaggacaacacaacaacagtcctttctttgatgagattgttaaagtccgatacttggaggattttgatggttcttttttttatcaaaatacgaaggaagcaaggacccacaagtacacatcgatgaatttgatatgcagatgtgtgtgcgaggaattgatgaaccaatcatatcacatatctttgttactatcttatccgaaccggcccagacgtggttccatacgctgctattccgatcaatccgcaattttgaggatttcagctagaggtttttgctgaacttcgcaaccagcaaaaacagctgaaatccgagttcgcactgggcaaaatacgacaacaacctggcgaaacattatagagttatctggatcgtttgaagaaagcagcgttgcaagtacatggatttgaggaaaaagtgcacgtacacctcatttctgccgatttgagtggatcatcccgattggcgaagtcaatatataaagactcggtgaagtcattgctagaattttgagcctggtcgaagaagtatttggagttagaacagatggagatcgccaatgcaacaggtagagaaaaaggaaagaagccctaggaggaggagtccactattaagaggcaggcaacaccaggggattcctaatcaaggtagaaacccggatgttaagtttaggtcggggaaatatgaaacaaaatacgaaaaatatacaccattaaatgtatcccggtcacaagtttggagggaggcagcgttgaatgacatgaagaaggtggagcgaccccgtccagtgtataacaaagttggggtagatcaatcccaattttgtgagtttcacaatgggtcaggacataccgctggccagtgttgggatctccgagatgcgattgagaaattcgtcagagaaggaagattgaggtagtacgtgataaagacccagggccgaaagaacaagcgcaaaggtggaaaggttcaacctgacacagaaaaagaagacaagaggaaaaagcagactgaggaagatgaatttctagagccggagtttgagtgtaatgtcatctccggagctttgggcggaggaggagatacttctaatcaaagacgaaagtatttgaaagaagttctttcgataagagaccaacccaagtttaaagggaaaatcggcaaaccacaaccccctattttatatttcacagaggaggatatgaaatgtgtggtgccggatcatgaagaaggcctagtaattactagaacactagttagttgccgagttaaaaggatattcatagataacggaagttctgcagatattatcctctggagcgcattcaaaaagatgaatttggacgatgaggacttgaagccatgtaagacaatgttaatagggttcaatagagaaaacaccaatcccaaaggttccattgaccttcggatgacattagggactaaagacgcattcaggctggaaagagttatgtttgttgtggccgactttcccacaccgtacaatgttatcctgggaagaccaactatccacaagtgggatatgttgatgtctactaaacgtcaaaagataaaaatggtagggaacaagggtatagtggtaacaatctgcggggaccaaaaagaatctcggcaatgttattacaatacagtcaaggaaagcgagggtggtccatcttcaccaccccagatacgacatagggatcacgtcggccgaaaaatgacggagcgtcaacccggaaaatcgataaatatggtagaacttgacatgggggaagattatgaggaatggagaccaaaactgggtggagatgtggaagaattgtagataggaaaccaaccttggcagatcaccaagatcgggaaaatggttgactcagacatcaaagtcaaactcatggagtgcctcaagaggaaccaagacattttcacttagaaagcatcagaaataccgaggatagatccaaaattttactgccataaattatctatgtaccccagagcaaagtcggtccaacaaaaaaaaatggaaactcggcccttttccgtagataaagggaggttgttccttagggtgggttgggaaaaatccaggcaatgttgaattgagaaagaaatgaaaaggggattttttttctttcaatttttttgtcttttcttttcgactatctactctccccggaaaagaacacaagcactcgccacacaaatcagagagttgttggaagctgggtttatacgagaaattcattacactatgtggctatctaatgtagtaatggtttagaaatctaacggaaaatggagggtgtgcacagattatactgacttaaataagatgtgccctaaagatgcctacctaatgccaaatattgaccaactcgtggataactcgtccgggttccggttactttcatttatggacgcttattcggggtacaatcagatagccatatatccagcagatcaggaaaaatagcctttatacgtaataaggcaaactactgttataatgttatgcctttcgggttgaaaatgcgggggccacataccaaagaatgatgaataaggtatttgagcaccaactcggtcaaaaccaccatgaatgatcatataaatgacttggaggagacatttagcaggttaagggaatataatattcacttaaatccgctcaagtgcgcttttggtgtctcggttgggaaattcctgggattcatgttaacccataaaggaatagaagctaacccggataaatgcaaagtcgtgctggacatttaatttccaaaaaacaaaaaagagattcaacaattgacggggagattggtcgctttaacgcgtttcctcccgaaatcagcagaaaaggcactccctttcttcaagttactaaaaaaggaggctaatgtaggatggaacccgaattgcgaggcatcgttcatggagataaagagatgtttggcctccccacctgtattatcgaagccggaacctggggagatattaatattgtacttatcagtgggagatgaagcggttagtgcgatattggtaagggaagcccacaaaatgcaaaaacttgtttattttgtaagtccagccctccaaaattccgagttacgataccaaaggttggaaaaagtggcctttgcccttttggtagccgagaagaagcttcgcccctatttccaaagcatacaatcattgtcagaactagtcagccaatccgacaagtaatacacaaaccggatttggctgaaaggatgataaactgggcaatacaattgttcgagtttgatttgaaatacgaagcccgacatgctattatatctcaagctttggcggattttgtcatggaattaaccccggttagtggtgattcagaaaatgtgtggaaattatatgtcgacgggtcatctaacatgaaaggaagtggagtcgggatcataattcaaaacccggaaggagtggccattgaataatctctccaattaaatttcccaatgtcaaataaccaggctgagtatgaagcgctgatagccaggttgtgtcaggagaaggaacagggagcgaagaaaataaaggtgttcactgattctctgcttatcacagctcagattgaggggcgttatcaagtgaaggggccttgattaaccaaatatttgcacaaagtcaaagaagttattgtcgattttgatgaggtcattgtgagtcatatccgtagagaagaaaattcaagggtcgacattctgcaaaactagcaagtactaagaatccaggtaatcataggattgttatccaacaggaaatttccagaccaacttgtgtcatgataatctcggcaagaagattggaggaggcctatgattgactatttggaaaggggcatgtgtccggatgatgtaatggaggccagaaaattggtatgcaatgcagccatgtacactattctagaagatgaattgtaccgcaaaggattgcacaccccaatgctggtttgtttgaatccgaatagaattgattacgtgttgaccgagatacatgaaggtatcaatggccaacacatgggagctaaggcattagcaagaaaggcccttcgagctggatattattggccgacgatggaagctgattctgcaaggcatgttaaaaaatgtgaaagttgccagaaacatgccaagttgttgtggtcctccctatcgaattgcagtctatttcggccccatggcccttttttaagtggggaatggatctgttaagaccattcaaggcagcagaaggccaattgaaatggttggtagtggcagtggattgaagtagaacccctcgccaccatcacgtcggctcgagtacaaagattctttgaacgaaacatcatttccaggtttggaatcccgggtgaaattgtaacagataatgagacgcagttcactgataaacggtttcaagagatgatggttgggctacagatcaaacataattttgctttagtagaacaccctcaatccaacgggcaggctgaaacagcaaataaggtgatcgtagacgggttgaaaaagccgatgcacgaagccgactctagttgggtggagcaactatattatgttttatggggacacagaactacgattcaaacatctaccaaagaaaccccgttcataatgacttatggttgccaagcaatgataccagtagagattgactaattatcttggtgaagaaaacaagtactccaagagagcgaaggaaagaacaatgaggctttggctgtagagttgaatttgacaaatgaggtatgggttaaagcacattgtctggatttattagcaaaacaactagcaactgtgaagtacaacaagcaagttaagtcgaggcattttgaaaaagacaacctagtgcttcgaagggcgaatattggaaacaaacatgctcgagaaggaaaattagcagccaattgggaaggaccatgtcgtgtttcacagacactcggacaaggagcttatatattggaaacccttgatggaagagcaataaagcaaacttggaatgcggataaactgaaaatatataacggttaaatccgggtccaatgttctgctggaaggagcagtaatttgtgagctgcaataataagtgtttgtttcctttgtcggaactaacaatgtaatttataattcatgtttttctcttttattgagggtatgagccgtggtactacaagtttttaacccataattcatattgtcctctttcattgagatcatgagttgttttgtaagtcgatcgcgaatcgttttacaaagtttatgaataaatattcttatctttatgatgagattgcagagttatctacgtacagtcacgtacaaactaataaagacatgtgcgtacacgatgcatcatagttattattatcttggcaataaacgatacgctattttaaccctgatcaggttgaaatgtaggaccatttaattaaagtaaatgtctacatatagcatgttaattgttgtaaggattaagtccgggaaacacagcccgaaacgtgttacagaaaagaagaatttgtattataaaatacttggtcgttgaaaccaaatgaatatttattccgcacgccaagaatatcgtcacttttggccaaataatttcataagaattcattttagtacggattcatgcgtatttggattataaaaaaaggggaatacgttaataaaaataaaattgtgttgattacaaataaagtcggcatcaaacccgacaatgtttaaaaagttcgaaaataaagaaaatttacaagttaaactggcatcccggtccttcaaccacctaagctcctggggtttgaacttgcatatcagcctgctgggtagaagtcacctcttctccttgagtcggatcctcatccattgggaccataaaatcttcacggggagaaggagggactaacttgccattatccacgtaggcttggaaatgcataccggtggtatttagtttaattcctggtttcaaacagtgtatttgttcaagggtgtttttgaaggatccctccaccgcttgcctccctcaccatgacagcatcctactcggccacctgtagcttggattcaaccttgtgcaacctggattcagcctccttgcactccaactctgatttatccaactgagtcttcagttcattgaagtgttgggtcaggagcgagttcttttttcgggctgtttccaaagccgattgggtactcttagcagtgtccaaggtagcttggagctcttcgtgtaaagaggcattagaatcctgcgacccaaggatatcctatgtgtttttcaggtctcctcccgcaatgcttggagctcgcccactagtttgctatgcctagttttcaaagttgccagacattgcactagggcaacacatttgaaggcattttcttaaatgcggccgagctcttcaaggtcaccatgctaaaggagacttgaatcgaagaagtgcttgggaaccttgacgacacggatcacatcatttgtaacccctttctcccataggcatcccggtgaagacccagaatcattagtggaggaaggaggagcagaagaaacaagcagtggagggggtagttcaagttcagcagttcccggtagagaagatgccgagttagttttatttatgggggctatttcctgctgcgccggctagacaaccttgcattttttccctttctctgcccctaagatggcaagaaaagttggaggtttgtgatcgctttggggggtgagaacactcaatcgctgaggcggaaggagttgtctttcccgggtcgcaatagaagcggcttgttttggcttagcggtggatggcggttgtggtcccatatcgttagctacaaaagtaaaataaacagttagagaagattaagttatacatcacaaatcaaagtcaagcatgttcatactgaattcaataggaaactcggactaataatggcgaatataagaagtaacacttggttggccgtaagcttttgtatatgtcgcgatccggatcactgaggaagcatcagaatcttacaaatttgtttcccagaaacggaagaagaggggggaaggtcatgatgggtgcgggtccaatagagcggaaacttccactccacgtctcgcgactctgggccagatagaaagaaatgttgtttactgggttcggcaataaccttgaagtatttatttttaaaatttttgaacgattcgttataaaccgtgaaaagcttacaatttgaacgaccccgaatggaaacccatccctttttgttaggaggttctctacccgtcctaccggtatgtacggtgaaataataaaaaaagaggcgaacagtacaaggaatttctaagtgttgacaaaaaagttcaaaagatttgatgaaaccccaactgtttggatggagttgcgagggagctacatgaaggtgatttaaaatttgcatttgaaagtccgaaagagggaaacaaattcctaggcaggtaattacatctttgtagaaaaagaaaaaattgcgtttagtgccttccccgatagaatggataggttcgtccgggttaggagcacggacacaaaaaccatcctgatttccgaccaggagcgcatcaatacttcacagttgtaaatcagaaagggtatgtaacacctcatggatgacccatggaaatttggtagctagaatggaaggacagtctgaatgtgactcggtagagtgagattcagcaactagttctgctgatgatagatccataaatacatacgtaaaagagataagaatcagtaaaacatacctgaaggggagatattggtcgtatgagtagaagatttgattaaagtgtcatccggggtagggacgacatctgtaggacaacttgcgttagaaggaggcattttctgtacaagcgcctcactttgggatgcagttttcggtttggggatgagaaccgggttgtgccagcatgattcaagtattgaatcggccctcaaattgaacctgaactttaaaagataggaactttcaataacaattaatgcacgtatcgaactgggtttcaaaggagcaatctaaggaattattttgttctaaagatgggaacagagtttgtggtgcaggacttaaagttgaaaggggaggacttttggaagaatttctagactcagaactaagggaatttgggggttagaaattttggttttcttcatggcactagaaccactagaaggggcacgcaagaaatattttttcttttcttcttctgaaatgggaaaaccgaagagccagtatccagttttgttgggaactattttgagcaaatgtgcttcctcttcgggagtgagtttcattttaaatagaggaaataagatttcacgcaagtggatgaaaaaaattgtgagaatgatgaataaagaaaacgcctcaagaacagaaacagaaacccaggagtaagaaggaataacacgaagatacctggtgggagaaaagtcttgaagaatttggtggcgaaaggtgatgagcaatagaggaaagaacacacaaatgcagagaatgcagaggaagcttgagagaaatagagggaaaatgtaacctttaagagatataaagaagaaaatgtaaccgtcgcagacacgaaacggtgcaattgcataactggcaggcatgaagcgtcgtgtaggggcaaaagagtcaaattcattcaatagatgggggggggggaaatagacaaatatattcaaacgtcatgattaaggagtgtaatgaagcgatggtgcattaaatgtgcaaatagtacgttactattaaggacaagacataatgacgttatttgtaacacctcgtgtatacccggcgtattatcattatgattatattagattagcgcttaacacagtgtaattaaaaacttctttttttttatcgcggaagcataaaaccaaaaccatatttcttgatcacattgtgtatagaatcacaacccacaaccaagcataaacaagcccctgcttaatcagatcatacaaccaacatccataggcagaataacacaatatctcaaagatatatataaacaggaggaacataacataacgaaacaggttatgtacaacatcatctgacacccgaggtgtctatacaaaagaataagcgtccgagtgctttctgatccctaggatccttcctcacacgagggcatacatatatacaacaaaactacatgtacatcacatgtcttccctctacaggggtacaaaacataaacaaaagctgagccgagctccaagctatccactgctgcccaaggccaagcaggtaccgtctctactggggcctcccgccctgagaccgctcctctctactagaagcatcacctgaaaaagcataaaccccacacggggtgagataaacatctcaataagctcagggtccttggaggcatctcctccaccctggctcactcaccatgacacaagtcatcagggtatcacaaccatctgggcctcccagcctctcatatcaacacaagcaagctatctagctctatgttcggcggaccgcgtcaacgccgacttcagtgtgaaaccggaattcacacccgtgccatcccattgggagctatcccttacgcatggatgcacgtatatggtacctccgagaataggcaatcaaccgcgacgagacatacctatctcttggtcttaggggatcatcatcaccccgggacccagtcaaccatgagcaaaccaaactaggaggtgcgctctactcctagggaggtccatatctatcttaactggccagaagatctaataacaagcttaatacatttctcaatcacagatacatgcatatattaatatgagtatgcaacatccacacaatgcatgtatcatgaatgtaaccactactccctcgaagtatggtggagcacaagcaagtgggaaacatccccaagggtccaagaacttacctggcaaagctgagctctgcggttcttcccttgctctgtggtccacgccactgacacccacggtgtcacgccctaacaaggcacatacaagcatgtatcaaacatccatacagccacacaaggcatacaagcaaccacggttcacaaccgctcaaaatgaaaggaatcacaatcctttccaaaccatcaaggtcttctatcctatggttcaacaaggcttatcatccacaagccctcatgccaatagtctcacaaggccatctaaaccacgagccaaggctctagcatgtcacaatgtggccaagcaactcagcccacaacaatacacatgcttcacatagagccatgaagccaatgttcaccaaactcacatttaagagctaatcctacatcctcacaacattctaagcacatgcttcaacaggacccaaagctaaaactagctctatcaaaagtgggtcactattcacccaaaaccccaactcacaaatcaagcggagtttctcgagtttcttacctcaaagatagcaaggaatgcccaaggacgacttcccctagcttgggtactcacgaatcgtcgccgttcctcgccaaactcgagttcttcaaacttcccttgagaaagggatcctttgatttaggggttttcaaggacgaatgaggatggattcaagctctatatgtgatttccatcatgaaatgagtttaagggatgaattttggtgagatatggtgaagaaatgaagcttggaggtccaacaatggaggaaaggggctggaggaaggagaagagaaggtttggggctcagaaatcgtgaaatccactttatatagtggccctgtcagagctgccgcactgattgcgccagctgcaggtgaccacggggcgaatcgcgccaaccccgcgccaagagcgccagcctccagaacttctggcgccaggagtgccacctcccgcgccaagagcgcccacctccagaagttcccgcgccaccagcgccaactcccgcgccaggagcgctgacctccagaacctccagcgccaaccgcgccacacatggcgccaccgcgccagctggaaatcttatagtggtctggcgccaccagcgccagcctggtgcccaaggtgtcaaccaccagagactctggcgctgggagcgccgctcccgcaccatcagctccagacactagagttgtggtgccatcagcgccaacctggcgccatcagcgccacaattatgcagaagaattctgcaaaaggttttctgtagaattcaacgccaaacgcccccagacttgtgccatacgcgcccaaactcgggccacacgcgctgggactcagggttatcacattatttcatcaaggcattccctatcctatatgacagaagcatagagatgaatcaaccatctaaatcacaaaggataatatatgttggcatcccgatagtggtaaggaagtggtacgggatcgaagtagaacccggataaggatggctggggtgaaataaagaatacctcgacatatgataatcaacagtcagtcaaagaggagtattaagtgtttaagttgctgggaagagtagcatagattagtgcatctcggctgcctagaagcctcgacaaccgggctgggggacaactgttacagattcgatatatgagctcgatgttaaggcccattgagaattcaattcaaaacttcaaactattgaatataactgaagagaagatcgtggaccttaatataataacaatcaagaagatatagatgttaggcggttagagatattgaccgaatatatcggaagggatccataactgacctagaggtaagtctattataaataagggttactttcagaggaaaaaggtacacaccactcgttctctcttctcttttccattaacactgcacacacctcatcccactgattgagtattgtttcgtgcatagtgatcatatttctggaggtatttctcttccatagataccttaagagagagcttgatccaatatcaaaatcaccagtttccttgctggacaaacctgtttgtaaaagatagaacaatggggatgtgaagcaaatgcagaagaagatggcagcggctgagaagagaagaggaggaggggtgggggtgtagggaaactactaataggtatagttttgttctttacacttggggtgtgaatagtaaagttggggagagaatagcaatattcaaaaagcattttcaaagtctaatggtattgaaactagtgaatatttacctcagaaacgtcttgggccttgcattgcatgttcaatttcagtccacattgaggcatccctataaaaaggaaaccaacaatattagatactcttatatggcagttattgtttctctacaaaaattccttcttacctagttgttggaatatctttgcaagtatccatgccatccacaaccattcctctcgtaccactgtaccagaacagaatcaccgtaaaacggtaaaagcatcccaaaattcagaagaactgaacatcttgaaccagatcattaattaacacctcataccaattcagtaataatagtaataaaaaaaggcttaaatactccatcaatggatcagtcaaaatcgtgtcttcgacatttcccttgtttttttaacttcaatgttgacaaacttatatcttatcatttccatgttatgatgatcaaacagtcatcgattttttggcacttaatttttggctaaattaatcttttaatccttttttttatttaatcgattcaatttggttaattataaataaaatgtaaaatttgatccctatcaaaatcaagccaatattgccttttccatctaattgatcgtaccagtgttagctaaattcaacacatgtcactttcacattttacattagttatcattgttacggttaatcatacggaaagaataatattgctgcaattttgagaattaagagattaagttgtatattttttatgataaaagagctaaattgaactaattcaatgaaaaaggagatcaaagtaataatttagctaaaaaaattctaaacataaataaaaaagacatacttgtacagttgttctcaatgtcttcaatatggatttatggacaaccttaactgcccgtaacatcttgaaatatcatttcgattcttctttataacatatcttagatcttataaaatctattcatatatgctcctttcgattttgaaacaaatcaatggttttgcaagaccatttcaaccacttggttgaagaattctttttcatcaccaacacttttatcctagcaattaagtcaacatgattttgcatattgagaaccgttgttttatcgaaagaccaacattaattcaagtaactgcaatgtgtttcttaaaatgaattgtttttgtcctcttaaacataagtttccacatataatagaataaaaaacagtttccatataatttagtatttaaattgagaaatctaccactaatcttatgagagaaaaaaaaaactaaaaggaagacataataaggaagtccagtcacattgcctgcgcaaatcaaacagatcacaaggcatacattcagcttttagcatgtcatggtgttccccaactacctccttgttagaaagcaacttagtgcattattaaataattccttttctcttttcgttcttttgtcctagtttgtctcccaagcaaacctcctctcttccacattcattgtctaagtttatacaaaaatctccatatataatgtcatataagttactttccaatttgtggcttcctttgattctgatctgaaaaatgaatcaaggacacctaaaagatcgccttcacattagtactttgcggacaatatcatggtcactaagaatggatcctctcgtgttgataataaatcgtattgaaaatttatatctttagttgcttcttataaatattaaatagactactttctgaatttaaaggtgtcaattgagtagattcagttcatccaagtttctctcaccacacattgcataaaatacgtgtcaatttaacccaacacacttttgaaaaataaagtaatttgactcaattaattatgggtcagtgtgttatgtaagttggctcacaagctaacttaatttataaaaatacaaaaatacaaaataaacatagaaaaattaatgaaaataaacacaagctaacttaatgtttaaactttctaaatttaaatgtgtaaaaccgagtagattcaatttatccaaatttcctcatcatacattgcattattaaatatgaatcgattttaatccaactcattttttttaagcaatcaatatattattcgactcaattactacgagttagtgagttgaatggattgactcaagctaacttcatttataaaaaaaatacaaaaaaattaaaataaaatataaaaattaataaatataataaaacacaataacatatgaattcatatgaataaactcaaggtttaaaaaataacaatattaataaaatttaaaatcaaaatcaaaagcaaataaaaaaaaatatgacctggcaattcatctggattgactcacttcaacccataaatcaagtgtgaggagtcaaatcaaaccacaaaaagtaaatcaatatttttttcaatttatttaactcgtgagttgagctaaatcagattaatttatggcttaagttaatttctaacacttctctttattgaacatctttatcaagtgagatagatataaaatttcaacatcacctttgtcatgcatgtttaatagggtatctatataagaaacaaaacttggtttggaacgtaaatcataaattttgagactcctctaacgtgattttctcaaaggaaaaaatctcacctcttatgaaacggaagttgaaatgcagaatatacatggaaaatataacaccaaaggattcattcccaccattaaccacacactatttttgcttatatattgatctagtatttttgttatcttcttctttgctcttctcttcctccactccttatctcactttctcattattgagctcatgatcgagttgagtaaccaattccttcttatgcatccactaaggcattcaacataagaataagaatctagttatacaaacctggagacgacgatttgaagtcgccaggtagcattgttgagtgcgagagggacaaaagactttgttgagtgcgagagggacgaaagggtgagagagcgagagtgagagagcgagatcgagagtttcagtgtcgtgagagtgagagagcgagaacatgagttttagcgccacgagagtgagagtgagagaacgagaccatgaatttcaacgccgcgagagtgaagggtttggatgccagaccattttttataaaagatccaacaacattgatttttaaataaaatcaatgttattcacgaattccatgacatcgattttccaaaaatcgatgttactataagaaacttaacatcaatttttataaaaccaatgttaacattttactatcaatatcggtttttcaaaactcgatgttgagtttttgttagtaactccgatttttggaaaaccgatattgagtttcttatagtaacattgttttcaaaaaattgatgttgactttctgctggtaaatcgttttttcaaaaaatcaatgttaacgaattctctttatttatggatataccactgcgaataatttaacattggttattcttgtaaccgatgttaaattgacgatgttgaatatatattttgtaatagtaaaaatttggtaaggaagactaaggacaataagaaaatcacatacattatagggaataaaatgtggttataaatcaacccataggtttagtttttttctttatcaaatgtagaataaagcaaagtggtgccttgctaggcaacttgcaagaaaggtgcttcttctttattgaagaggaacagtggagattttgtcatgtatcatggtgaaactttttaggtgccatttttccttgcaactttttgttttagtgggtaggaccaaaactgtaggtacaagcagcatgatggtactatatgcctctcacaaaggttggaaaagcaacaacaaatttagtgccggcaatgagctacagcaacagcaaaagaaattgaagagagggagtggaaactattagttttatgactttccatgttcttttttgggactatctagaccgtaggatttcatgaaatagatactatgctttctgaatatattctattctaacatgttgtgtgtccatatcatgaccgaacatgaaaaagcccaatattatatttcactgaacctttttaaaagtatattactctttttacttggctttttaagatttttattatggtaaagagaaaaaaggtttgtaatgcttaaacaaagacttaattttcgataaccattagttcataattggaaatcatataaatatgaagataagaaaacatgttattttacgattgtagacactgataatttagctatagtttttcatttcgaatcgcaacttttataagtcaaatggagaagagataaaggactgagtgcatatactattgactcgtgttttctttagtggtatatgaaaaaatcaacacggatgctcaaaataagttaaaataaatttaattatttgctaatatttagaagttgggcaaagtggggcttcttcagaaagcctccatccgttaattatttgctataaatatgaattatgctctttccatatatagctatcaaatgatggacatggattttgtatccattgatgaatatttcttgcgttttgattaaccaaagattcctgtaaagtctataccctaaattcgaaggcagcaccagatttaaaaatgggaaaagaaatgaaaaagtaaatatcatgtcagaaaagaaattaaagaatctcctatatattattattccttactaatgaaccatcacctattatcatccatcataccaaaagttgaaacgtggagccgttattaacctaaaagttatcgctgttaacagaattcacagattggtccactgcaaggattaaggttctgatatttatagtgattttggatactgaggactgaggagaagcatgatcttatggtttctcttagttacgagttgctctgctacggtatcaagagggttttcagttttttaatcgagaaatattaatgattaatttgttaatactaacaacatattctttctaacatattttattattatattgtttaaaatttatttaaaattatcaaattaggagaacaacttattgtatgaaaagtaagacctaaaaaaagtaaaatttacgatttttaataaatttcagtcattagcaattagcaatgaatgtattcaaaaagtctttttgttaacatttcttttttgagtaaatagtttaatgagtttggatacattgacaaagagaaaaggaggtttctcaataaaagtatcagaatacttaaattttctgtggtatcataaaatttcttatgtaatatatcgtaactcatatttaaaatctcacatcacctactcctttaatttctctcaaatctcacatcacctactcctttctctcaaatctcacatttggttcataaaaactcattaccatccttaaatcttcatatatatcccttccttgttccatttttttttttttgtgaatttcataattccatttaaatttacaaagaaagagaaagaataaggaacaatttgtgtgatcggaggaccttaatctctatttcggtaaaatacagctgttacataatccattacattgcagctttgtgctgtgaatttttcggtgattttcaagcacactgtaattgtgatgtgatgcgcttgcgggcactaccacaaaatgcaatgttttagccacatcatgtggtgcgattcacaatttgaaacaccaaggttcattgaaggtaggagtgacaatttaattcatttagtcattaatcatcaaatgcatccatgtataaattcaatcaattcatccaattttaaaagtaaatattaatggaatagttggattggattacaatttgctatcagatcgatgaatgaaccattttacatattttaatttattttgtcgagtaatttaaagtttactaattgagtataggttttttaagggacctgaactctactatgtttaggtatgagtacaatattaaactttattttatgaaattattttttttaaaataaaacattatataatctaaatgaatgaaatggatatccatcaaataataaaaaacattaatagatagtttgaatttttttattaaataaatcctgaattgattaatttttaattagttataattcgtctaatgatttatttataagttatctattattattcaatttaaaaattatctagtccatccatatgattaaaataaatacaaatctttgaaaccagagaaatataggaacatcaacatattcttctaaattaaaagggccacacgctcaaatagaaagaaaaaaaaaatagaatgtagaacgaaaaagggaaaaagaactttcattcttatggagagaacaaagttaaaagaagctagagtggagcatgagatgctcatagtagtggcacttagtacatctatggtcaaaagtcgagactaaactcaatcaattaatttccatttcgagattaatttataatttgctttttatccctttttattatatcgtcgtttattaaatttcagctttttctttcttcttttccttatttcctgtttgttaaaaaatattatataatgtcgacgtacatggtataatttctcatactttattagtattttagatgttatagtgtagtggaaattaactaaggcaacgtggtacattttatgcgtcactttgcacaatgctgcgtgactcagcaatttcgagccaaacatatgatgacatggtctagtgtccaaaataactgcttccacttgcctacaaaagcacgtgaatgattcttgacttatagatcattccacgcatatagattctgttttattatcaatattcagttgccgcgtacgatcattaacccattggatcctaacttaacacattgaattaagactaaccagtggacttaatcatgggggttgcacttagcacaatgatttatagtagaatcgtggactttattttgaagaaaggtgtaatagattctccaacttaaccttttagatgagacaatgaatattttctaggatagaaaattcttttgaatcaaataaaattattataaatatgatgataatgtagcaaattaagtgatctttcgtgaactattaattttagcttttaaattaatctcgagttcacattatcatgatacacatttgatactatatctcttcttcatcgctgtcaaaaagcttcttcctcttcgttcaaccttcgttattttcctcctgtaatcacccatcatcgccaccaaatactgcactctttagccacctcttcccttttttcctcaaatccctctcctcaactaatatgaacatgcaaatcttatgctatggaaaccaaacaaaaaaaaagtcatcaaattaaaaccaatatgaatatgcaaatgtgttggtattgagcaattacacaacaatcaattaagaaaatagaaagggaagaaaaacaaaacagtatttatccttattcatctaatgtgggttacgtccaattattttctatattttccccacacactcgttacaatgcactcagattataaggaaatatataagcttagaaatcctaaacacagtagctatttatgggtctaagtccaaactacaaataataaaccataggcccataacagtactaggtctcgaaaagctccaggggtgcttccccctgctcgctcatcgaggagcaggatccttatctacgagtgacttatcttctgaaggcaaagtatgagtcatacctaacaaaatgcagcaacagcctcgacctcatcagagacacaactaccatggccacacgctggcgacacagggcaccacatccgcagcagcacgggaaattgtaaatgcgacaataactttgatctcatcgaagggtgaggaaataaatcttaggcacaaatctcaaaagaagaagcaatataatgtttgcgaatttgttgttcaaattctaggacagtaaagagaaatgacggtttcgatcttgcaatgtgatgaaagatttgtgatgcgaatttcttcatggcaatttgtgattcgcattgagttgttggatgcaaggattcgttcagtgttggggtgaggctaaaaggttgtcatatgttgaatccatttggagaagatgtgaaggagcttcgacaatggtagtttgtgatagtgcgtggtgacaaagaaggttactgtaagagtattatttctgtaatattttgtgtcaagaatgatcacactaagcctctatttataatcaaaggagtaattacaaaaaggaattaaatccctaaaaatcatatattccatattcctagtttccctatttacattaaatcaaatcatatcattgatactctccctcaagctggagcatatatgtcatatgtacccatcttgttacaaatataatcaacgcgagaccctttgagagatttagtgaacatatctgccagttgttcactagagttgacaaagtcagtggtgatttctcccgaaagcactttctctctcacaaaatgacagtcaatctctatgtgtttagttcgctcatgaaagactggattagatgcaatgtgaatggcagcttgattgtcacagatgagcttagtgtcccgcgtgtctccaaagtgtaattgttggagaagttgccgaagccatacaacttcgcatgtagcagctgccatggcgcgatactcagcttcagcactagatctagcaacggtattttgtttcttgcttctccatgagatcaagtttcctccaatgagaacacaatagccagaagtggatttcctatctgatggtgatcctgcccaatcagcatccgagtaacagacaattttcgcattacctttgtcttcatataggagtccgcgaccaggtgcattcttgatgtatctgagaatacgcatgacagcatccaaatggctatcacaaggagcattgaggaattgacttaccacgcttactgcaaatgagatgtctggccgagtgacagtaagataattaagtctacctacaagtcggcgatatcttcccgagtcttccaatggctccccctgacccggaagaagcttgacattcgggtccataggagtatcactgggacggcagtcaagcataccagtctcggtgagaatgtccagagcatatttcctctgggaaagagaaatgccagaggcggattgagcaacctcaatgccgagaaaatatttgagcggacctagatccttggtctgaaactgactgtgaaggtgagacttgagtcggcggataccatcaaagtcatcaccagtgataatgatgtcatccacatagacaactagataaatacacagtccagaggaagatggagtgagaaaacagagtggtcagcctcagaacgggtcataccaaactgaagtaaggcggagctgaagcgaccaaaccaggcacggggggattgcttcaagccataaagagagcggcgaaggcgacagaccagaggggcaccaccagaaacactgaaaccggggggctggtccatgtaaacctcttcttgcaactcaccatgcaagaaggcatttttgatgtctagttggtgaagtggccaatgaaggatagcagccataacaaggaaaagacgaacagaagtgatctttgccacaggggaaaaggtgtcaccgtagtcgaggccaaagatctgagtatagcccttagccaccaagcgagctttgaagcgatcaatattgtcatctggtctaacctttactgtataaacccagcgacaaccgactgtagttttgtaaggaggcaagggaactagctcccaggtaccacttgcctctaaagcacccatttcatccaacatcgcctgttgccaacggggatcactcatggcttcacctgtagacttagggatagacacagaatccaaagaggtaataaaagaaaaataggaaggagacaagcgatcataatgaagagcacaagcatataaaggattaggattgcgggaggaccgaatacctttgcgaagggcaagaggaagttcagactcaggcggcggtggtggacgagcgtttggagtaggagatgatgctgggggaccagtaggtggaagcactggtggtctgcgctgataagttacaagcgagggcgggatagggatgactactggagctggaacaataggcggaacatgcagatctagaggagcagtgggagtagagaagaaaggggtagactcaaagaaagtgacatcagcagaaacaaggtaccgttgaagttgaggacagaaacaacggtatcctttctgaagacgagggtaacccaaaaaaatacatttaagagacttggcagagagtttgtctttacctggagtaaggtcatggacaaaacaagtgcaaccaaacacacggagaggaacaggataaatgttctcttaaggatatagaagggagtacggagtccgattattgaggacggacgagggcatgcggttgatgagataacaggcagtaagaagcgcatcaccctagaagcggagagggacattatagtgaagtaggagggttagtttgccaatgccacgaactttaatataagagccatctgcaaaagtgatagaaggcaatgagttggaaaaagataactgagagaaaagagattggttactagtcatatgatcagaagcaccagagtcaaggatccaaggtccaagggtggaagactgagaaataaaggctacaggattaccagagtgagccacggctgtaatatcttgaattttaagcataggattaagcttgtgattaagaaacataacccaagcattagagttcttaagaaggaatttcggtttgaggcgtggcgcggtcagcgccattaaccgcgtggttggcgccatgggatgtgagtggcacggatagcgccatttgccgcgcgggtcgcgcgggaagtgccctggaaatgcaaatttctctggtttttcacgcggttggcgccaatggtggcgcgggtggctcgtttggtgcccgttggcgcgattagcgccagaggtggcacgatccgcgcgggacccacaggcagacttatataataactcgttttggacgaaagtaagagagaaaagagaggaagagagagagggaagccattgttggactacggagcttgatatctccttcatctttcatctaaacacctctgacccaactgagaaagtgttcagagcctcgagataagctagagacctagctttattctcgacaagaggcggtaaacggcgagatcgagatttctaagggagtccttgggaatcgaagaatcagaggcgaatgaagctttgattgagcgagctaccttagggaaagtgattccctggtgtgtctggactacacagaggtaagaaactcgagctttagccgttgattctatgtttgggtttttggttggttttgaataccttgagagatgtttttggaggtgtcagagtcgttattacgcttggactctgtagagttttatgctcagagggttgttctaatgaagttagagccttgaatcatcattattgatgaagtttgattttggctctgagtatgtatgagcagaagtgaaaggctgatgatatgagtagtatgaaccttagagcagttgacaaagttactcatgagttagtgtggatgttgtttgccagtgggaattggtgataatgggaagtttggaattaatctgtataagcagggatatgctttgatcagagtcttagaagaggctctggagccttgtgtaggctgagtaggatctttctgagggtctgagaatcacttgtgaagtgattgttatgagttatgtggaaggaattgtggtttcctttcgatataacggcttagaaccgttactgataccttgtgttttggttctgtaggacgtgagcttgatagctctggtggtgttgaccacgaggccgggagagtcagtgttttgcctagagcaggtaagctcttggttcttgtttatgcatcctttgctgtattccaccattatcctggtatgatgatggttctgtgtaatgttatacatgtatatgtgaaaattatgtattgtgactaattgctgaatgttatgctataccctgtgaaagggaaatggatgtacagtgatatgtgatgcttgttgtgtgagctgcaccctgagattgggtgattgatatggatggctatggttgtttagcttatgatctgcatgattgattgttgcatcctattgtagtaggatagaggacatgtgatcgagtaagtcccgatatgagatgttcctgtgatatagacgtagcctcccgaatggagatgttcctatatctacagacgtagcctcctcgggcaattgtattgagataggatggagatgttcctacgatatagatgtagcctcctggggagatgttcctatatcagcagatgtagcctgcttataaagagatgttcccgttatatagatgtagcctccaggtggagatgttcctatatatacggatgtagtctctgatagatgcattgagatcctgctatgagatgtttcctagtatatagatgtagcctcctggttggagatgttcctatatatctagatgtagcctcagcgggatagtgttggacatgacgaatggctgtatgccatgagtttagcctgattgtggtcaggtagatgtgcattgattgtgcatgagtattgatgagtgattcactgattgtggtcagatgaacacacattgatgatgctctgatgttgatgtggattgttttgatatactattttcatgtatatgtgtatgaaagtgaaccaggggaaggaaatacctttaagggccctgagtttactgggattttatatctcaccccttgtgtggggcatatgttttgcaggtgaatcctcaggaggagctgatagatcccaagacaagaagcctgtgcagggatagctgtgctgtgaaaccttaggcatagattattcgagcttgtagctctaatattatgtattctgcctttggtttattttgttgtaccctgagggaatgtatttgtacaattttgtacctaagcacagtttatatgtatattcagcatattatatgtacagtgtatgatagtgacctgtatgatgtcactcttagttatgcttccaaactgtttaaactctgatgattatatgtgtgtttgctgtttatgcttggtaatgaccctgatgattgagggggcgttacattatggtatcagagcagttttggtagggaaacactgtacatatggtgaattgtgtgttttgtgtggttgttctaggtgttcattatggtaattgcatgtgtggttgtgagagagtgagcctgatcaactcaccctttttatgtgatatgtgcagtaccatggtgaggaaccggaatcaggatggtgtagcgggtgcagatggacaccctaacccagtggtagccgccttggccgctatgcagcaggagatagctgcaagcaggcaggcaaatgaggccttgatgaaggctaatgaggagctgatggctgagttgagaactcggcgtagagaggatagagtaccttctccacatcctgtacctgagggcgagggtagtcgccaggtgggtggagctagccatctcggaggaggaccttcacagtcatatttagaggaggagattgtggctagaggaaggatgcttactgcttttcgtaagcatgatcctccagtgtttcatggaaagtatgatccagtggtggcggcccgatggttacaggccctagagaagatattcacagtgatggagtgttcaaaccatcacagacttttgtatgccacctatatgcttcaaggagacgctcatgagtggtgggttaccacatcagagctgatgaggggccagggagaggctatcacctggtaggcttttgatgcccagttcctggacacatattttccgcgagacgccagagagcagaagcaggcggagtttgagactcttgtccagggccagatgtcggttgatcaatatttggctaagttcaatgagttagccaaatatgcttatttcaggagggaattacctgagactgatgtacttgcagctaagttccagaggggacttagagagtgtaatacctcgaattttaaccatgtgtttaagcctaggttaagcctggattaagctttgagattagtatctaagtttatggattagagttcctgagaaaggaagcttaaaaatgcaagttttaggctgttctggcctgcggcgcgacccgcgtgaggtgcggcgcgacccgcgccagatgtgtaaatcagggcagatggttctgccatgccacgctaacagcgtgagatccacgctagtagcgtgggaagtgccctagaaaaccatgttttcctctggagctccacgcgagtagcgtggatgtccacgcaaatagcgtgggaggcccgagcaggtggcgcgagtagcgtggggaacggcgcgagtagcacgggactttcgggtagcctatatatataaagctcatttggacgaaaatggaggaggaaaaagagagagaggaagccattgatgagttccagagcttcataccttctttatcgttcatctaaacacctctgacccaacagagaaaatgatcagcatctcgagataagtgagataccccgattgattcttgagaatagctgagaaatagtgagattgatttctctgagagaacccttgagagatcggagtttaaaggcgaaggaagccttgattgagcaagctatcttagggaaagtgattccctggtgtttctgaacatcacagaggtaagaaactcgagctctaactgttggttctgtgtattggattttggggttttggggtaatcttgaggggtgtttttggaggtgttagacccgtaattaggctcggactctgtagagtcttatgctcaggggactgttctgaggaatctagagccttgaatcatcattactgatgaagtttgattttggctctgagtcagtctgagcagagataaaaggttgactagttgactagtctggaccttagagcagttgacaaagttgctcatgaggctatatagatgatggttgtcagttgaaactgattatactgagaagttgagttcaggctgttttaagcaagattatgcttggtgttagcctgatcagagtctttgtggtggctctgtagtctggtataggctgagatggatcctgctgaggatcagatgattacttgtacagtgattagtgtatgtttattgaaaggatgagagttccctttcgtttgaacggtctagaaccgtatctgatactatatatgcttgttcttgtgtaggacgtgagcgtgagagctcaggtggtgttgaccacgagaccgggagagccggtgatctgtctagagcaggtaagctcttggttcctgtttgtgtatcctctgctgtgttccaccatatacccagtggggttatggttctgatgtatgtataaactagtagaggaatgtgtataatgctgtgaatgattgatagatgtggtttgaaccctaggaaagggtaactgatgtttgacatttgatctgaacccagagatgggtaattattatataggaccgtgagttattgattaatgagtgatgtgtatttgtttcctgagaaaggaaaattgttgtgtacttgaccctaagaaagggaagtgatgtgtgattgaacctgagaaagggaaatcaatgaataaggttatgattcattgatagcatgcattattgactaggatacttgggtatgcatgtatatagatgctgtgtactgatgttctgatccctatgatagggagattgagatgtattgatctgttatgcttgaaatgtgaaacctgactatgcatgtcgtgcttgaatagtatcctattgtagtaggatagatgacttgagattgagaaagacctggtgagagatgagcctgtgatatggaggcagcctcctacgtggagatgatcccatattcacagaggtagcctccccggggaaattgtattgtgttagaggatgagatggccctgtgctacatagaggaacctcttgagaagagatatgcctatgttcacagaggtagcctcaccaaaaggagatgtaccggatatatagatgagcctcgtgagagagggatgtacctatatgtctagatgaagcctccgctagggattcatgcaagagatgtgccgagtatatagatgcagcctccctgtgaagagatgatcctataaacttagatgtagcctctgcatgatggttattgatgtgataaatgactttatgtcatgattatgccttggttttggctaatgacgtgtataacctgattgtggtcaggtgtgttgtgcattgacgtgcttgatgattgatttaatgtttcactgatgatgaatgtgtatgagctgagtccttgatattggatactcatgttatgattatgtgatgatgttattataagtgtgtgatgcattaatacaagccctgagcttgttctggttttcattgatagaggaatatatatatatatatatatgtattgattatttgtgtttgatacctatatatagatgtatgtgtggtcagtgaaccaggggaaggaaataccttcaagggccctgagtttactgagattttatatctcaccccttgtgtggggctatgttttgcaggtgattcttccagagtagcagagagatcccaaggcaagaggcctatgcaggattagatgctgctggacaccttaggatagaggacatgagcatgtggctcagatgttttgtattttgttttgatgtaccctgaggggatatttgtatagttttgtattgtacagagaaactttgatgtatattcaccatgttatagtgtacagtgttatacagatgacatttgatgatgtcacttttagtatttgcttccaaactgcttaaactctgattgtttatctgtttgattgtggtgtatgtttggtaatgaccctgattagagaattggggcgttacagagaggacattgaggagagaatagctggcagtggatcccgagatctggggagtcttgtcagacagtgcagacaagtagaggacatgatcaggaggcggcgtggcagtcatcttgttccttctagtagacctgatgcgaggagatctggtggtgcaggcccagccaggaaaggcaagggcagagatttgaaagtttcttcctcttcaaataggttcaagaggaatcagagagatagaccacccagagcaggtccaggtcccagatgtgctacttgtgggaggactcactggggtgcatgccctactggggtattggtgtgctacagatgtggcaagcctggccacttttctagacagtgtccccaggccagagatcggcccatgttgagttgagggggaactgaatgaagatcaagtaaagattcaatcaaggtgcaagtcttggagttttgactttcaacatggatcaagcattgaagatgattgtttgtgatttgatgtaaaagggttgaaagcatcatgatgatccaagtcattatagcattcatgtatcatttaagtattgcatcatagaggagttaagcagttaattagaaaattaagagaaagctaagaaaacagcataaagaagtaataatcgattactggctaatcttaatcgattattttgttcttaaggtttctggaaaaccaagcataaacactttaatcgattaccttatcgggttaatcgattacacacaactcagcatacttgaaatttggtcgtgtgactgctttaatcgattaccatagtgttgtaatcgattacatgctcattggataaacttggtcactctgccttaatcgattaccattaaatgtaatcgattattcttcacaatcatgatttaagtgtaggactgcattagtcgattaccactgaatgtaatcgattattcttcataaaactgattttagcatatgtctgacttaatcgattacaattggatgtaatcgattacactttactatcagtatttttgctcaaacagatttaatcgattacgtatcgggttaatcgattatcttaaccattagttgaaaatctgattctgcattaatgattttaatcgattacaggagcgtggggagctcatttaatcgattaactctgttacgatttcaactataaatagaaccctttgcctttttggaaaaagaactgagagagatcattactgagttgattttttacgatttttgagcattctctaaaggcatctaagagttcacaaaagtttcttctgggttcttgagtcttgcttcaatgattcattgatgggtaactaagattgttagtgaagcaagcttactcagtcacaaaggcttaggaattgattctgcatctttagattacattcaacctgaggtcattcattcatttgcatttctatcttggatcatcaggtgaattctttcctaaatctttgtgggtatttcgtttttctgccgtaactctattttttttttttgttatattgtaagttggttttcttgcaagggagatagggtttctccatgtataactgagtaggtttctcagtttgggtgtagcttctaagggtctaatagggttttagatcactgaactttctctagggttgagaaagagaagtttgtaatatcttgtaagaaatatatttgcagtagtagaactctactctagtgttgagtagaagaaactggatatagcctctagttttgaggtgaaccagtataaatcttgcttcttgctttaattactgcattctttattgtttctgattgaactctgttttctgtgtgtttaaaatttaagcatatcaaatcttggattgaacttggataaggatattcttttagttttgtgacaaagatccaaagggcatttttaactctgatttttaataagaaaattttgaatatctatacttaaccaattcaccccccctcttggttaattgtgagtgtttcttattttccataacccatagctgctcctgtgatctcagtagcacccagcacaggccggatttatacaatggatgcgaaggaggcagctagatctccagatttgatcagaggtacgattttgattggtatgtgtgatgtgagagttttgtttgattctggagccactcattcgttcataagtgatcacactgctataggactgaacttgcctatgttcagacttccttctcccatggaggtgaccacagcctctagagagcagtgtagagtggagatgtgttgtagaaatatgcactttttgtatgatggcagagagtacagtgtagatctctattgtttatctatgcctacccttgagattattttgggtatggattggctgaccagatatggtgttatgctagattgttgtcgtaagagggtggttgtgccttcagatgatattagcccgagctcagtagcattcctttcagtgttacagactcgtaaagagctgagaggaggagctcaggggtatctgttgttgagtacagcggtggagagtcaaggaatggatatttctgagataccggtggtaggtgagtttgttgatgtgttccccgaggagattacacagcttccaccggacagggggatagagttctccattgacttggttccaggtgtgggacccatatccatagctccttaccgcatgtctccttcagagttaaaggagttgaaggcacagattgaggacttgttgtccaaagagtttatcagaccgagtgtgtcaccgtggggagcaccggtcctctttgtgaagaagaaggatgggagtatgaggctatgtgtggattacaagcagttgaataaggttactattaagaataagtatcctttgcctcgtattgatgacttgttagatcagttgaggggagcctgtgtgttctccaagatagacctgagatccggataccatcagattcggattaagcccgaagatgttccgaagacagctttcaggtcgaggtatgggcactatgagtttcaggtcattccttttagattgactaatgccccagcagtgttcatggattacatgaacagagtgtttagaccatacctggatcagtttgtggtggtatttatagatgatatactgatctactccaggagtcaggaggagcatgctgagcaccttagacttgttttacagactctgagagatcatcaactgtttgctaagttgtctaaatgtgagttttggctttcagaggtgaaattcctgggccatgtgatctctgcagagggtgtgtcagtggatcctagtaaagtggatgttgtgatgtcttgggagaggcccagaaacgtttcagaggtctgtagtttccttggtcttgcaggatactacaggaggttcattcaggggttttcacagatggtattacccttgactcaccttactaggaagggtaacccgtttgtatggactcatgaatgtgaggagtgttttctgagtttaaaagagaagttgaccacagctccagtgttgattcttcctgatcctgagggatgttttgaggtatactgtgatgcttccaagcggggtcttggttgtgtgttgatgcaggaaaagcgggtagtggcttatgcttccagacagttgaagccacatgaggacaattatcctacccatgacttagagcttgcagctattgttttcgctctaaaggtatggagacattatttgtatggtgcccagttggtagtgttcagtgaccacaagagtcttaagtatctgtttgatcagaaagagttaaatatgagacagatgcgatggatggagttcctcaaggattatgattttgagttgagataccatccaggcaaggcgaatgttgttgcagacgccttgagcaggaagcatgtgagtgttgcttgcataatgatctctgactgtaagttgattgaacagttcagagatatgcatctgactgtgattgagggtaccagtggtcttgatttgagtaggaccaaagttggtaatgagttgatacagaggattcgtgaggctcagaaacaggataattctatgatagacctgatgggccaacaagagtttagctgggagcctaatgatttgatgatgtaccaggaccggattgtggtgcctaagggtgaaatggttgatgcagttttgactgaggctcataaaggccagttcagtattcatccaggagctaccaagatgtatcaggatctcaagaggagattttggtggccagggatgaagagagacatagctgagtacgtgaccagatgtttagtatgtcagaaggtaaagattgagcatcagagaccgtcaggtttgcttcagccattacagatccctgagtggaaatgggatagcatttccatggattttgtagttgggctgccgaggactcagactggatgtgactccatctaggtgattgttgatagactgactaagtctgcccatttcatgcctgtaaggactgactacaccgcaaagaagctggctcagctatatgtcagagagattgtcagactgcatggggttccttagagtattgtcagtgatagagatcctaagttcacttccaggttttggggtgcgcttcaggaagcgtttggtacccagttgagactcagtacagcctatcatcctcagacagatggtcagactgagaggaccatccagactttagaggatatgttgagagtctgtgctctggagcagggtaccagatgggagagatatttacctctggtggagttctcatataataacagttatcatgcgagcttgggcatggctccatatgaggccttgtatggccggaggtgcaggactcctgtttgttggtctgaggttggtgagagacagctgttaggacctgatatggtccaggagacttctgagcagatcatattgatcagagataagttgttgagagctcaaagtcgacagaagagtttctatgatcataaacacaggccactgcagtttgagaagggcaaccatgtgtttctgaggctgtctccagtcactggtgttggacgggcgttgggtgtgaggaagcttagccctagattcatcggtccttaccagatacttcagagagtaggaccagtggcttataggctagctttacctccccagttgtcaggattacacgatgtgttccacgtgtcacagcttagaaggtatgtatcagatccttcacacgtggtggagcctgacactgtccagatccgagaggatctgacttgccctacacgaccagtgaagattttggaccgcacagaaaagaagatcaggagtaagaccattcctatcatcaaggttcagtgggatggcaggtcacctgaggaagcaacttgggaacgagagtaggagctgctacagctgtgtcctgagttatgtgccaggtatgatcttaattttgcggacaaaattcttaaaagggggggagtaatgtaatatcttgaattttaagcataggattaagcttgtgattaagaaacataacccaagcattagagttcttaagaaggaatttcggtttgaggcgtggcgcggtcagtgccataaaccgcgcggttggtgccatgggatgtgagtggcgcggatagcgccatttgcggcgcgggtcgcgcgggaagtgccctggaaatgcaaatttctctggtttttcacgcggttggcgccaatggtggcgcgggtggagcggttggtgcccgttggcgcgattagcgccagaggtggcgcgatccgcgcgggacccacgggcagacttatataataactcgttttggacgaaagtgagagagaaaagagaggaagagagagagggaagccattgttggactgcggagcttgatatctccttcatctttcatctaaacacctctaacccaaatgagaaagtgttcagagcctcgagataagatagagacccagctttatttccgacaagaggcggtaaatggcgagatcgagatttctaagggagtccttgggaatcgaagaatcagaggcgaatgaagctttgattgagcgagctaccttagggaaagtgattccctggtgtgtctggactacacagaggtaagaaactcgagctttagccgttgattctatgtttgggtttttggttggttttgaataccttgagagatgtttttggaggtgtcagagtcgttattaggcttggactctgtagagttttatgctcagagggttgttctaatgaagttagagccttgaatcatcattattgatgaagtttgattttgactctgagtatgtatgagcagaggtgaaaggctgatgatatgagtagtatgaaccttagagcagttgacaaagttactcatgagttagtgtggatgttgtttgccagtgggaattggtgataatgggaagtttggaattgatctgtataagtagggatatgctttgatcagagtcttagaagaggctctgaagccttgtgtaggctgagtaggatctttctgagggtctgagaatcacttgtgaagtgattgttatgagttatgtggaaggaattgtggtttcctttcgatataacggcttagaaccgttactgataccttgtgttttggttctgtaggacgtgagcttgatagctctggtggtgttgaccacgaggccgagagagtcagtgttttgcctagagcaggtaagcttttggttcttgattgtgcatcctttgctgtgttccaccattatcctggtatgatgatggttctgtgtaatgttatacatgtatatgtgaaaaatatgtattgtgactaattgctgaatgttatgctataccctgtgaaagggaaatggatgtacagtgatatgtgatgcttgttgtgtgagctgcaccctgagattgggtgattgatatggatggctatggttgtttagcttatgatctgcatgattgattgttgcatcctattgtagtaggtgatgagtcactatttatcactatttactcatctttctgtactcattttaatccctaatttgtgtttaatcatttattttgcactgtttctcaattaggacttaattggactgataattcagattttaattaatttggattattttaagttaattatttcaattctttttttcagggcagtttaataattaattgggcttggaattaatttatggactgaagattagtgcgccacatcagcatcagcttaatatttcccatatcaaattatagatttcgtttttatttatgcttaatattttccatatcagaatatggatttcgtttttattttattttatctttagtgattttgggccaaaattgttaggaaaaggtccattcttttaggttaggcagttactatatattgagggttctgtgcccatacacagacacaactcagatacaacaaagacaacacacagccaacaacactgttttcgttttagggttttagggttttagatagttttcgtttctgcttctctgttggtttccagaatacaattacgtttttgattcagttttattttcgtttctgttccttctaatttcattttctgcaatttctttttcttctattttcgttttcagtttctgcttctaattcgctttctgcttcttctatttcgttttcattttctgttcttaactttgtttaatgttcagtttcgttccaatttacgtttctgttgttaatttcgaattaatggaaggctaaacctagggttggaccctaggacagactgcagacctttaatggaggttcttattcttctaattcgttttctgcttgttcttccctgttagggtttttgttctgtatttttcgaattggattcatgcttaatgattctggtattgattgattcagtattctcagtttgcttaattctgagagtttaccctaacgaggtttacgtttgcttaattcgtgtaatgacgttttaggttaatcttcgcttagtcgattaatctggactgataaggattaagtcagaatcaattatcttttgtgaaccgaggaaattagaggcgcaatctgttctaagggtctgacttgtttttaatcactgcgtttaattagtaattctgttttattttatatattctgctaaattccttcaaaaaccccccaacacgttttcaatcccttaaacattgacaattgatccttgagagacgacctaggagtcactttcctagtactacattttaaaatcaaattaatttggttgcgtacggccgcgatcaaattttggcgccgttgccggggatcattaattctatttaagggttctgttttttgtgttctgttattatttaaaaaaaaaaatttcgaattggtacctgttacctatatcactttggcttgttataattgtgttttagatttttgtttcttgcatatttggtttgttgatcaattttgcatgaccaatttagtgccctcagcaagcattctgcgcataccaagagacgcgacgtaacatcattgaatagagtgaacaatacctattttttctgaattacttgtgattttttgttttgatagttagacttgttattttttcgtgaatttttgtgtggtaacttcttttaggttatatttgtgtggaaaaataccaaaagcacttaaagtactccagattctgagatacaaaaatttggaaaactaacttttgtgaaaacttcaaactgccataacttttgatccgaccgtcagaatctgacgtattatatatgcttttggggtagaaaaaaaagatctagccatcccaggccgcgttgccacttggcgaccgtcggattttcaaaagaagcccgttttctattttatttttatttttgaagttttattttcctatttttctatatttccttaatctattttatttaattatcctttgaattaggtcttgaaatttggtatgctgtcttttcatgattttagggtgttgctcacaaatttttagctcatttggacttcgtttgagtataggtctagttttacctctctttgttcttatctgtcaattgcttgatatgctgcatattgtgcatgactagaggcaatccaggagacttgcaaccctttgatcctgagatagataggacctaccatagattaattaggcattctaggcaattttccttagattctgtagcattagatactgttagtttgaattctgagtattcttcttctgagcatcctgtgcataatatttctgattctgattttgctgattatttttatactgagaataatatggctcaacctccacctcgtgagaggactcttagggagctggctgcacctgaatttacctatgaaagtttgtgcattcagtatcctgatgaggatgttccatatgttctcaaaactggactaatacatttgctgcccaagtttcatggtcttgcaggagagtgtccacataagcatctgaaggaattccatatagtctgttcaacaatgaaacctccagatgtccatgaagaccacattttcctaaaggcatttccacattcattggagggagtggccaaggattggctgtactaccttgctcctagatccattactggttgggatgatcttaaaagaatgtttttagagaaatttttccctgcatctaggaccacagccataagaaaagatatttctggaatcaggcagcttagtggagaaagtttatacgagtactgggagagatttaaaaagttgtgtgcaagctgtccacaccatcagatttctgaacaactccttctccaatatttttatgaaggacttaacaacatggagaggagtatgattgatgctgccagtggtggagcacttggtgatatgactcctgcagaagctaggcatttgatagaaaagatggcttctaactcccagcagttcagtgcaaggaatgatgctattgctattcgtggagttcatgatgtagctgcgcattctagttcttcttcatctacagctacgaaattagagggcaaattagacattttggtgaatttagtgactcaacttgctgttaaccaaaagtccacctctgttgccagagtttgcggtgtctgcacttccaatgatcattatactgatgcatgtccctctctgcaacagcaacctgttggccctgatgctcctcaagcttattctgcaaacatttataataatagacctcaacaacagcagcataattatgacctgtccagtaacagatataatccgaggtggagaaatcatccaaatctcagatggtctaatactcagcaacaacaaccacctccagtaccaccatttcaaagttctgctggcccaactagaccttatgtacctccaccagtccagcagcagtaccagaggcaacaacaagatgtacctgttccaccagcacctcaaccttctacctctgaaccttcattggaggagcttgtgagacagatgaccttgcaaagcttgcaattccagcaagagaccagagcttccattcagagtctgactaatcagatggggcaaatggctactcaacttaatcaggcacagtcacaaaattcagatagactaccctctcagactgtgcagaatccgaaaaatgtgagtgccatcacattgaggtcgggaaaacagattgatattcctaatgcagtgtccccatctccatccataccagttcctacccctgcacctgtaccaacacatgagcaaagtgatgaacaaactcgtgcaggtgaaccttcttccagcaccagttctgatgtgcagcagcagcttcccatccctcttccatttcctccgagatcaattccaaacaaaaagatggaagaggtggataaggaaatattggagatcttcaagaaagtagaagtcaatatacctctgcttgatgccatcaagcacatcccgaagtatgcaaaattcttgaaggagctgtgcactaataagaggaagagaaagatgactggaattgagagagtcagcatgggcagaaatgtttcttctatgacaggtaatactgttccaaatatgcctgaaaaatgtgaggacccaggtacttttagcataccctgtattattggtagtaataaatttgataaagctatgcttgatttgggtgcctccataaatgttatgcctctgtccatttttaaatctatgtctcttggtcccttgcaacctactggtgtagtgatacagttggcaaataggagtgttgcctaccctacaggtttcattgaggatgttttagttagggttggtgaattgatttttcctgctgatttttatgtgcttgatatggaggagggattttcccatggttctgtccccctcattctaggtaggccatttatgaaaacagcccgaactaaaattgatgtgtatgctggtacattgactatggaatttggtgatattattgttcattttaacattcttgatgccatgaaacatccatctgaaaatcattctgttttccgtgctgagattcttgatgatgttgttgatgagtatatttctgatttctattcttcccatgctacaaaacaatgttttctatctgatctttatacttctcttgcatgcatggaatctgaatgtgaatctgacaatgaatccagctttgaatttcaatctgaacatgtgtccaattttgatgtctattctggaattgattctgatgtattgggtgatgtacccttggataataacttgttagagtcagaatgcactaaccattttttaggaagtacacaagaatctgacttgcaggttgaggtacaagctgtggaacccatccttctttcatctttggttccttcttctgatcagcccaatcccattccagaattaaaacctttaccggaaaacctcaagtatgcctacttggataatgatgagaggttaccaatgatcatttccaattcccttgatgctgatcaagaagacaagctgttgaacgttctgaaaaagcgtaagaaagccatcggatggaccctggcagacatatctggtattagcccatccacttgcatgcacagaatatcattggaggatggagctaaacccgtgagacaaccacaaaggagactcaacccggtgattctggatgtagtgaagaaggaggtgaccaagcttcttcaagctgggatcatttatcttatctctgatagtcagtgggtgagtccagtccaggtagttccaaagaaaacaggtctcactgttgtaaagaatgacaaggaggagcttatcccaaccagagtacaaaacagttggagagtctgcattgattatcgaaggctaaaccaagcaacacggaaagatcattttccgttgccattcattgaccagatgcttgagcgtctggcaggtaaatctcactactgcttccttgatggtttttctggctattttcaaatccatattgctcctgaggatcaggagaaaaccacattcacctgcccctttggcacttttgcctataggaggatgccttttggcctgtgtaatgcccctggtaccttccagcggtgcatgttgagcatattttctgattttcttgaaaattgcatagaggtgtttatggatgattttactgtatatggatcttcttttgacatatgtttagatagtctggataaagtgcttaatagatgcattgaaactaaccttgtcttgaattttgagaaatgccatttcatggtagaacagggaatagttttagggcatgtcatttctagtcagggcatagaggtagatcctgcaaaggtatctgttatttcacatctgccttacccctcttgcgagcgagaggttcgttctttccttggccatacaggtttctacaggcgctttatcagagatttcagcaagaaggcccttccgctatccaatttgctgcaaaaagatgtggatttcaactttgatgatagctgtaagaaggcgtttgatcaccttaaggaagcattgaccactactcctatcctccaggcacctgactagacagttccatttgaattaatgtgtgatgcatcaaactatgcattgggagctgtcctgacacagaaagttgataagctgcctagagtgatctattatgcttccaggactttggatgctgcccaagcaaactacactaccactgagaaagagcttcttgccattgtgtttgctcttgataaatttagatcatacttgcttggttctcctgttattgtttatactgaccatgcagctctaaagtacctgttgaaaaagactgactccaagcctagactgatcagatggatgcttttgctccaagaatttgatttggatatccgtgatcggagtggagctcagaatttggtagcagaccatctcagcagaattgaaggagctgagaatagtcatgagatgttgcccatccaggataattttcctgatgaaaatcttttaagtgtttctactgttttttctgtttctaatcccaccccttggtttgctaatattgtaaattatttagttgcttctgtttttcctcccttggcatcacgagctcaaaaggataaacttaagagtgatgctaagcattatatttgggatgacccctatttgtggaagttatgcagtgaccaggtgattaggagatgcataccagatcatgagattgattcggtcttgcagttttgtcattcctccgcaccaggtggccatctcggtatacagaggacagctcgcaaggtttttgattgtggtttatactggcccaccatcttcaaagatgcggcaaagacctgtaacacttgtgagcagtgtcagagagcaggaggatcccttacatggagacaacagatgcctcagcaacccatgctattctgtgaggtgtttgatgtctggggtattgatttcatgggtcctttccctgcctcttttggtttctcatacattttattagctgttgattatgtttcaaaatgggtagaagccagagctactaggactaatgacgctcgggttgttgtagattttgttcgttctaacatattttgcaggtttggcatacccagagccatcattagtgatcaaggaacccatttttgcaatagatccatgcaggctttgctcaagaaatatggggttgtgcatcgaatctctacaccatatcacccccaaactaatgggcaagctgaaatttcaaatcgagaaattaagaggatcttagagaaagttgtccagcccaacagaaaggattggagtataagattggacgatgctctttgggctcataggactgcctacaaagcacccataggaatgtctccttatcgagttgtctttggtaaggcatgtcatcttcctgttgagattgagcatcgagcttattgggctgtgaagacttgcaacttttccatagatcaagctggtgaggaaaggaagctacagctaagtgaactagatgagatccgccttgaagcatatgagaactcaaaattctataaagaaaagaccaagaagtttcatgatagcctgatagttaggaaagacttcgaggttggccaaaaagttctcttgtacaattctaggctcggactcatgggtggtaagttacggtcaaagtggattggaccttttgttgttactaatgtttatccttatggtacagttgaaatacaaagtgagtccacaggaaagagcttcaagaccaatggacacagccttaagccattcctcagcaatccttctttgctagatgcagtcgtggaagaaatatctctgattgaccctacctcccttccatcttccactacaccttagaattttcttttctttctcctcctttatttttatcacacttgtccatatttattgcattattctgattgttctgaacttttatttgtgctacattgaggacaatgtgtaattttaagtgtggggggggggagagactgttatttttgttttgtttgttagttttgttttgtttttgttctgttagttttattgtcttgttttgttagttttaagtcttatttttgcgaatagttttgcatgtttctttttgatttctgggttttgaataagttttgacacctacttcatgcttagataagagttgcttcatgctgtatgatttgaaatccatgtttttctttacttggaaagatgattatgaagtttgaaaggttgatttaactgtgacagatataccctgtgtgaggatttgagccactatctgttctttcatgtgtgctatacctcttgattgcttgcacagttgccttgtcttgactctgtttgatatttcttggttctcatgcatgtttggatatgattaaggcatttttgttctgataagcctctggccaaataagcttaccctgaatttaattcctttgacaaccctgttgagcctaatttcctttcttttgtttgaagctcattacaagccttaagtgaaaaacaatgattaccttaaccttagggaattttggagctttggaattgttttgggaataagtaaggggggtgcatgtatatattgttttggatgatatctctggcctgttggtttactctgatgttcagcttattcttcatgtttttatgcatatatcagtcagtaccatatataaaaaaaaaagaagaaaagaaaagaaaagaaaaataaaagaaaaaataagtagttgaagaaaagctgttgtgtttaaagcaaaggaaaaggaatggtgatagaggcttattagagatttttgggtttatttttgtacttacttcttacttattccccattgctcctctagcccctctggtttgcagctacttatcccatattttatcctacccatgtccttggccacattacaaccctgaaaagaccttttgatccttatgtgcatgtttattgggtgttgattatagaggcttgccaagtctatctgttgcttgttttcatgagtgttttgagagtatacagttgcctaaacacttgagagatacagtgtgtgatccagtgcatctagtgaggttctgttgcttttaattcacctcttgaacggattgattgttttgctaaagttttgaatgcttggatgaatttcataagtgtgtagtctctctgactctttgtgtgttggaaattgtcaactcctttctcttttcctagttttcattgaggattgtgtgaaactgtttatttttcagtgtgtcactttctttaatgtctttataattttccttgctctactttttgattttgcccaggagtgcaaaaggctaagtatggggggttttgatgagtcactatttatcactatttactcatctttctgtactcattttaatccctaatttgtgtttaatcatttattttgcactgtttctcaattaggacttaattggaccgataattcagattttaattaatttggattattttaagttaattatttcaattcttattttcagggcagtttaataattaattgggcttggaattaatttatggactgaagattagtgcgccacatcagcatcagcttaatatttcccatatcaaattataaatttcgtttttatttatgcttaatattttccatatcagaatatggatttcgtttttattttattttatctttagtgattttgggccaaaattgttaggaaaaggtccattcttttaggttaggcagttactatatattgagggttctgtgcccatacacagacacaactcagatacaacaaagacaacacacaaccaacaacactgttttcgttttagggttttagggttttagatagttttcgtttctgcttctctgttggtttccagaatacaattacgtttttgattcagttttattttcgtttctgttccttctaatttctaatttcgttttctgcaatttctttttcttctattttcgttttcagtttctgtttttaactttgtttaatgttcagtttcgttccaatttacgtttctgttgttaatttcgaattaatggaaggctaaacctagggttggaccctaggacagattgcagacctttaatggaggttcttgttcttctaattcgttttctgcttgttcttccctgttagggtttttgttctgtatttttcgaattggattcatgcttaatgattctggtattgattgattcagtattctcagtttgcttaattctgagagtttaccctaacgaggttcacgtttgcttaattcgtgtaatgacgttttaggttaatcttcgcttagtcgattaatctggactgataaggattaagtcagaatcaattatcttttgtgaaccgaggaaattagaggcgcaatctgttctaagggtctgacttgtttttaatcactgcgtttaattagtaattctgttttatttaatatattctgctaaattccttcaaaaaaaacccccaacacgttttcaatcccttaaacattgacaattgatccttgagagacgacctaggagtcactttcctagtactacattttaaaatcaaattaatttggttgcgtacggccgcgatcagtaggatagaggacatgtgatcgagtaagtcccgatatgagatgttcctgtgatatagacgtagcctcccgaatggagatgttcctatatctacagacgtagcctcctcgggcaattgtattgagataggatggagatgttcctgcgatatagatgtagcctcctggggagatgttcctatatcagcagatgtagcctccttataaagagatgttcccgttatatagatgtagcctctaggtggagatgttcctatatatacggatgtagtctctgatagatgcattgagatcctgctatgagatgtttcctagtatatagatgtagcctcctggttggagatgttcctatatatctagatgtagcctcagcgggatagtgttggatatgacgaatggttgtatgccatgagtttagcctgattgtggtcaggtagatgtgcattgattatgcatgagtattgatgagtgattcactgattgtggtcaaatgaacacatattgatgatgctctgatgttgatgtggattgttttgatatactattttcatgtatatgtgtatgaaagtgaaccaggggaaggaaataccttcaagggccctgagtttactgggattttatatctcaccccttgtgtggggcatatgttttgcaggtgaatcttcaggaggagctgatagatcccaaggcaagaagcctgtgcagggatagctgtgctgtgaaaccttaggcatagatgattcgagcttgtagctctaatattatgtattctgcctttggtttattttgttgtaccctgagggaatgtatttgtacagttttgtacctaagcacagtttatatgtatattcagcatattatatgtacagtgtatgatagtgacctgtatgatgtcactcttagttatgcttccaaactgtttaaattctgatgattatatgcgtgtttgctgtttatgcttggtaatgaccctgatgattgagggggcattacaacggtggtcgcaggcgaggcagattactgggctgctcggaactggaggaaatcatgatactctgtggtggaaatagaaacatcagtaggtgcggtgacttgggccacattggccgtcttcgactgctcccgggctttggtgcgacattcagcttcgacatggccaaagcggttgcaataagtacaacgagggtgacttttgccgccacgactcaacttctcgcaaggaattagaggaacattggtaaaagtgaccgtagagctggcatcaccaaggggactggtaaaggccatgaggaagatatcagaaaagggctagacagaggtttttttttgaagtgcgtgcagcgacgtgtggcggtgcgtaggggcgtgtgcggcggagtcaggcgacgcggtttggggagctgggtcgtcggagggaggcgatactacccctgaagttcaccggcgaaaaaggcggtctggtgagagggaaacgatgttgaaggctgacgtggtactattcacacgcgagtactgttcatcgcgccaggaaacgctaaaaaaataaacctaaactactgataccatgtaagagtattatttctgtaatattgtgtgtcaagaatgatcacactaagcctctatttataatcaaaggagtaattacaaaaggaattaaatccctaaaaatcagctagagagatatattccatattcctagtttccctatttacattaaatcaaatcatatcattgacagttacgatgcaagtgagtttggggcttgttgcagcagcgacgaaaggatgatgatgtgatgtcaatggtggtggtgttaagaaaaacagtggaggtgttgaggaggaaggcatatgtgtttgcggtgacgatgaggagttcgttggtgtccgaagtgtcgttaatgatgacaaaggaatagatggtaaaacataaaggggacatagacaggatatggtggtgagggtctaccataatggcgtacacatgaaattaatcaaaccattaaaagatatgatgcatggtggggtggtccaccgtatatgtcgtctatgaatatttataaaaatttcttgagtatttaagaaaattacatatttaagactaaatatctttaattaaattgaaacaaactttaaaattatccacgcgacaaggttttgtttttttgtcttggtcagaaatcaagggtgttgtccaactcactgagtcaaacgctaatttcgctcatgccacgtggcttctgctgacccaatgaaattttgcacacgataagaatcgaatacatattcttccactcaatagatcattctcactcatatgagtgcaacaaacttttacaccaatacgccaatcctttgagtttatccagacgacaaataatattctctaatgacatccactattttaatacatttttatttaataaaatatagtatgtgtgatttattaaataaagagcacggtttagcaagtaactaaaccaatattattaagtgactcaaattttactcaataataacaaaacatggttatttaaaaaaatgatttaccaagtaattagacaaatattatcaagtcatattttattatggagtatatgaatcaacttatttgaaattattttaacttaactaataatctcaaaattgagttttagatatacatatactaatgatctacacaaagaaaaaaaaaggtcagacaatatttcaaaaaccaaaccaaatgttgtggattttcgatatagggttatttttgtaaacattatttctttctttttaaaagctctcatactagacaaaaagaaaatacaactaaagtttaaaccaaacagctacgctagcaacattgaaaggattatgatttgagtagtgttaaaaatatatttttcattaatgattaaaatttcttaaaaacaaaaaattgtaagcaggatttattaaacaaaaattaaacttacaaaatatatatttttcaataaacttcaattaataaaaaattattcagttagtattaacagaatcttattatttaacttaaaaacatattcaaaaaattaaattatcatgtgcttgattaattaacagatcaacttacgtgagtcaatgtgtttatgttaaattccaatgaataaaaaaagatcaacatgattcataattacgtattgtgcaaaaaaagaaaaacactacatatatgatgttttgttttagatttatgaataaaataaaattaatattacattgaaaaattaattccaaaataaataaatatatttcatttatacttcaaaattagttttatattttcaaccaactaaaatcaatatttctcaacttactattaaaatatttttccaaatacaaatatattgtttaaaattatatatactaaattcatttttttcaaaattaattccaccaaaatttatgcacaataaagttaaatgattcatttgaataatgtttgaacaaggatatatccaaaatacggttcaaccaccgccagtttagcctgatgagtttttaaaacatgtaggatcttttattatgtggggaattgaacttaaacactacctcattggtcactacaaattagtttattaaacctcttaatttatccctttgttacaaattacatcatcgagtatagttgaaggtttagcccctgtttcattgatttttgtgaacttgaaacaacatatatttatggcaaacactaggttaaagaatcaaaactagatttttttatatattaaaagtatattattaatacacaatgcatcttcaaaatgaattctaataaaaacttgcattcgttagcaaagctgcaaaggcatatacttatttgaagcatcaagcatctaaaaaaaagtgaataatcacaaactcaaggtaactcctctcgtcctatacgttttacagataatcctttctgcctatgtggaagatgcatatcactggcaaactctgatattgcatctttggtgccagcacatttaatatcagaatacaatatgaagactcttcaaagattgagtaacaaggaaactagtgaatccttgaaatatttacataaaaccacccttaagcatctaaaaatcaatccaacatcaatgaataaggtttagcattttagtaccttaactctaaaccctgcattctatatagttcattgattttgcatggactgcatttgcataattgtatcataaggtccaaactggaatccactgaggaaatactgctcctgaagtggtttagacccatatgaagaaatcccacaaagtggtgtcatgaacatgtttccatttgtggaattgaagagcataggctcagtttcacatggcaatttccaatcatgttcctgtttgattgccatagtagtagacaatctctgattctgggatggtggattcacatccttcactgagcgatctggtggatagggtctgttgttactctctgatgaaggagattttgcttctgggagattcaccattgtgatgtcatggatactggatctcttcttgtcctttcctccacttagttgcctgatgaaatacttttgagcatgacttgcaacctgagttggtgttcttgtggtcacaaaattgcgagagatgtttctccagtctcctttaccatacttcttcagacccatcagaaattgcctgtgatggtccatttagcaagtaactcagcattagacagtagttcttgcataaatcaaaagctcaagataatattaaattaaattcggcacggatttcactatagactttattgttaattttagaatttaattagaatgcaccttgtcaatacaaattgtcaaatatggtatgcttgttggcttcgtcaaatttattgtgcatgaaaatttaattcttaatatgttttgagtttctcattgattcaagagtaaaagccttggattcagacaaatatgtatacacaaaaaatagaccatattaagtgaagcatttttcatatcaatcatatatatacagtaaccagaactgactcaaacattcaaccaataactacacaaacgaattgcctaaaactcaaaattttaagcaaaatccttaacttcaaagttgtttaacaccaaagccaagcatggattattattcctccactttttgccacacacgaacataatcattatcttaatagggataacttatgggacaacaacacacacaacaaaggcttatgatgtgcaattacctgtgctcctctttagtccatggcacacctttcttcctctcctggtcagatgatctagtggaagcaccccttttgccagtaacaccataaaactgcctgagcccatcaaatccttgattgttgacccactccaaagtgaaggaatcagcagcagtgtaccctggaagtggaataaaccctgattcaatgacactcacatcttcttcaagttccctgtactgtttgatcacatcgccgaccgtcttgccgggaatcaaggccgccaccttcagccaccggtccggagtgtccttgtcaaacacagccaaagcattctcaaagagcttgttctcctctggagtccacctggtccccaagctttcttggaaaagccaattggaactttggaggtatgaggctggagaaagaacttcaatttccctgttcattgttctagtttaaggtagtagtagaagtaatagtagcacccatagctagcatgccaaaaacatatctattattatatgatcataaaaacatacacacaaatacacagttaatacttgttacacactctttgaagaaagttcaaagagagacaagatgtgaagagtagtggactagtggagctgctaagaagcatataatcaagaagcatttgcaaggaatctgctaccctttccacatagccacaacctaacgaatctggaaaaaaataataataattataacaaaaagaagctttctttccaaaacgcagggaaaactcataatccttcagcttatgggcaaactgcaaaggaagtattttttttttttaaaccctgaaactattcagatctaagagaagaaggaataatcaccaacacacacatacacatacacaaaaggaagcaaaccccagatagaaaaaagggtaaaaaaaaaactaaaatgtgcagagaattaattgcatcttaagaagcctatgtagttgacacaataattgaggtggctagcttttccagagagagatatgttttttttttttttttttttttacaattgagaaaagaagaagtattaaaatggaaaatggagagtatgctgaaggagaaaaggatggagtgaagtgaggaggagtacaaagaaggggaacaggaatgtgtcagggtctttgtactgtactggtgttgagttgagacagcgatctatagaacaggttggattggagtggggagagagagagcgagagagaggtcaaaggcactgagttgtgattggtggagagggtgcttgtgggcgctgagaccacacgatggatacaacaagtaggaggagagaactatcatcatttggatacaagtgacacgagtctgctttttaatggagtaatttaggttcaaattttgattcatttttatatttaaaataaaattatattaaaagaagaatatttattatgtttatgtttttaataaaaattaatcattatttttaattggaattattcgtgccaataataataatacgatgagaaaaaaaaaagtaggcggagagagaattgaaaaggacaagggttgatttggtggtgtggagggcgtggaatggtttgggcaaattgataatctacatggaggccatgaacattgatgtttgacatggttggagaattaggcaaaacaatcaattgggatatttttccccttaattatcatgtagagtttaattttgaattgatagttattagatctatttggaattggtacgttattctcattatatattaataaaaatatatattataaaataaatataccaaaaatataaaaaatattaaataaaataatattaaaaaatataaaatatatatacaaaatattaaataaaattttatgaaagagtaaaaatacatttatatattaaataattaaattaaaaaaattttacaatttcttaaaaaaaatttaaaattttaaaaaaattattactttgaatcataaaaaaataaaataaaaacaaaattcgtaaaataaaattgttttttaaaactttagagttgtaagataaaaaaaattaattgaagttataaaatattttactatatcttaaaaaataattccttactattttaaagttgtaaattaaaaaaattaattaaagttttaaaataaaataaaattataattgatttgtaaatgctaattaatgggaaaaaaatatccctaatttagcgttttaccggagaatcacgactgaagaagggaagttgtggtgtaattgaagtagaacaatgggggatcataaagtgtgggaaaatagacaaaaatatcattttgtggaagtggacgttgttttgaactgaaattgcgaaattgccaccttataattttcggcaggaggccacattgagattgggtatttgtcatttgatggttttaataatgtataaaaatacaaaaaatatcattttggtgctctattttttagtgaaacttattttatttctttatttttaaaatggctaaatcatatatttgatttttttaaagtcttattatttatcttttaaaattttaatttaatcatttatcttctttttgtttagttaaattttttatatttaaaaatgtttaatttgatttttcatcatatttttttgtttaatttagtcttttatattatttttttaatttgatcatttaagtgtttttaaaattgatgtagttaatcatttaaaaataaaattttttttgttcagttttctcccctttctctctacttcatttttaactaaaaaacttcacgtgtaaatgattaacgacatcaatcttaaaaatatcaaaggatcaaattgaataaaaaaacaaatgatcaaaataaatttttgaaaaataaatgactaaactgaactaaaagaataagataaaggaccaaattggatttttaaaatatcaaggattaaattgaacaaaaaaataaaataaaatattaattaggtcatttgtacttttaaaattcctcttttttttctttaattttataacgttgttctttgtttgatactaatactattagtattttaaattttaaaacaattaattttaacatagcgacaattaaaaattactattatgtttaactaatcaatataattaattcaaatataatgtaaatttttaatattcacaattttttattaaaatgttaaaaataaaaattctaatattcatttcagataaaaatgtctaatcaatcaaccttaacctatttggtactagactacatgggctagggctaaaattggtccatatggtcaaacgacatacgtatataaatggatcatatggcgcataggcccttaaggccatggtcaatccatggtccaaccaacttttaaaaattaaaatttagaaagttaaaacaattttctcttgtgagttaggactagccaataggccttaaatttaaataatttgacctagattttaatactctagccaaaatatagttgaagatattttagctaaggatgagttgtagatatttgtgattaatattgagttgaagatactctaatcgaggttgagttgaaaatattctaaccgagaccaagttgaagatattctctcgggtcaaggtcaaaggaaaggtgctttggtaaaggctagcaaaaaattttcgtagttgaggctgatttaaaaaagctttggccaagttccaaaaaattccttggttaagtttagccataaatgccctagtcaaggttggtaaaaaaatgcccttaacgagtctagccgaaagagacccaagtcaaggttggatgaaagaatgcgttgattgaggatgactgaaaaatgtcatagccgaggttggtcgaaaaatgccttagctaaagttggttgaaagataccctggacatgaccaattgaaaaaagcctttgtcgtagctagccaaaaaaagcccttatcgagttgggcaaaaaatgtctgaaccaaggttggctaaaaagatgccctagatgaggctggcctaaagaagcctttgcccaagttaaccaaaagaagccctggttaaggttagcataaaaaagccctgcccaggttcggccaaaaaaatgttggtctaggttggctgcaagatatagtgggcataagcgataaaaaaaaccttgttgagttcaacaaaaaaagccctgaccaactaaggcagataaaaaagtcctattcaatgttgataatattggaaagattagtttgtaaggtgaaacatcattacttaagtgatgatagagactcaaaacaaaagtttcaatatatagaagactcaaaataaagaaaaaatttattagatactgaaaataaaattcagtcatttatcataaaccttaaacacattcaaaccttttttttttattattccttttataattaagttttattaattgattaaaaacctttgttaagtttgatgccatttgtgtaaactggttttgtatataaaatagatagatatataatcttattaggtgtccattcattcaatttgggttcgaattttataggattattcatgggacaaatttttcttctaaactttaatgtaactatatttgtcttgtcagtaattaattaaacttaccaattaatatgtcatttatgttatttagagtgtttttttttttctcttttctagatttcttgtatttttactagagacaattatgtttgaatgaagtagaatcactatttagaatcttgttttatgtaattttctttttccgcttttgttaaaaaaattacatatattcttcgtgcaaacactagtgaaaagttaaagggagccaaactgatcaacgatttatcgaagtaaataacctttctgtatttcatgaaacaaacaagagcgtacacttgttgattccaacacatgcacaatgtgtcttagaaaaatgaatttgcaagaggaaaaccaaaatgctcgctccatcttattaaacgtggttgaacaaattctcctatttgtttaaagaaaaagcattcggggatactcgcttattaaataacctttttctttttcactcactcttcttttgcctgcctctctgtatccctccaaagcttctgttgtttcggcattggaaggcctttcttttgtgtattgtataattaattgatgattggcacattagcatatgggaagatctttaggtggtggtatcactgattgcttaggacctttgccattgtccaccaaaaatgccatctttagcccccatgttgtgtgtacctccaagtggcagtgcatgaaccaaactcctatcaaacacatacgcaacagatattttagtattaggatgagtttggtacactcttaaaaacaagacttttaagtgtgaagactttttatattgttatctagtcatgtatagtaatatatggtaaatttgttgattttaaaaaataaattttaatggttgatattttaagaatctttacatttgaccatacatgacaattaagctttaagttttagggataattatatcaattttctttgatgttagtagtaattacacagaattttaattgtgttagaaaattatgccaaccacacttttatcaattttgtcatttgcacaatattttagttaacaacatgtagaagtgatacataaaagggagaggtaagtaattttctaaacaagttggttgttaatgtaattagcactgccattagagtatatctatgtaactaattggtcccaagtttttctaactaaaatttaagagtgtactaattaagttgagtcatgttgtatatgagaatttatttttacctggattatctgctctgaatctaaatgcagtccaccctccagctggtactccaatagtgttcctttcaacaggatcaacaaggttaaaattcttagggtcagttttggggttgaaattgcctactcctcttccaacaacaaagaaattgaacccatgaagatgaactgggtggttctcaggtgcaatgattccagtatcttgcagcacaacctgaactgtggcattgaacggtagtcgataaacctttgtgccggtttcagtgttcaaattggctggtccaggccctgagtagttgaacacatgggggggattggcagggaaatcagtggtgaacaccccttttatgttgaaataatgtgcttgaagtaaggcaatggttggcataataaatgtcacattgttgatagcagccacaaccctgcttccatttgcagctttgcaagatggacaagggctaatccccaacccaacagtgaagaaaagtgagtgatcaacagttaatgggacattgacagggtattttttggagttaaggcctctaagagaggtggtgaatttgttggcaatttgtgtagcatttttgggaggtggggtggtgagaattgtgggagtggcagcaagagttcctgtgtagtgcaatgttgctgtggcagtcaagttgtccacagcaataggagcatccatgaaaggagaagctgctaccaagtacttgccagaattttggtcagcatttagaagaacattggtggtttgcccaggggctatcacaattgtttcaatcttgaagggctttacatatgtggcatcaacttctaccactgtgagcttatgaccagcaattttgaagaagagctcttcattgagtgcagcattgacaattctcagcaggtaggtctttccactctccacaggcaggttgtaaacatctggacgtatttccataaaaagaaaacaaataaagcttagtttgagcataaggaaaatatttaagagtgaatagtttatggattgatatttacactatcgtctaatcacaaattattatgtatgataagtttgtttacttttacaataatcaccttaaatgttatacctaccatgatttctgattaattgacagtaaaattttttgcataaaaattaaactcgatatgtaagtttagaggtcggagaattgaatagaacaaaataccctgtgtagaacaattggtaactttccctggaaggccattaatagtatgagcatctgagacatttggtgccaatcctgatttgagagcttcattgataacagcttcagtatcagatttccaccattctcctacaatttatcgccatagtgaattttaatctgaataccaattattgaactttaactaagtatagatccttaagaccaattaacttagtgaaaggaaaatttaaaggctatttgttttggctcacctaataccacaaccaattcatcatctggcgttgggaagggataaggcacacctctctttggcaagataactaaggcaccatggagagttgaccttagccagttaacatgtgcatgataaagaagtgttcctctttgccccgtgagtgtgaaattgtacaaataggtttgcccaggttgaattgggcactgtgtgacatatgcaggtccatcagcccaaccagttctcaattgcctcacaccatgcctaccaagatggcataatcactccaattagcattgaatttgaagattgtgttgattagagaaaaaaaattgtttactataacatccattacttaattttttgttctatactttctgtaacttagcatataaaatatagacttctattttttaccccaactttttagttttaaatgaatttatctcctacaaattaatttgacatattttatctatttttttttttaaaaataggaattttatcctttattattttattcctaacataattacactttttagtttttatcccctactttttataattttgacaaattttattctcaatttttgtgcttattattggatatatgtatgagataaaatttgtaaatttcttaaaagttggaggaaaatgtattgttaaaaaattaagaataaaattctccaaaaaaattaaaaaattgaggataaaaacgataattaagttaaaaatatatgatttctcaccaatggatggtaacgttgtggttgactttgttaatgactttgaccagcactgtatcatcttccctggcgtaaagtgtgggtcccggaaacttcccattaatggtgacaatagatttgcttgaacacaatctattggtttgtttagacaccacctgcacccattattaccaaaattagcacatcatatgaaaaaaactaacattgagcgtgcatttggttggaatgaattgaccgattaaccatctttagttgctgatttggaggtctaccgtccctgtcactagaattctaaatctactcattatgttctatttctgacaaaattgttagcatctactaaggattaagtttaggtgaaaattaatgcttcaaaactaataataatgattacaagatgccagcaaacgttgtgtacataccaagtaaaggattgacagcttatgttagtaatgttactacaatgtttcagaaataatattattacggttgccatttttttatatcttaggttatatgttcacacgaattatatatgtagatgaatatgtccaaaaaatatatgtaggttaataataagttcgtgatttatattaagaggggtttttatctaaaaaagagaatgaaaatattttatttttaaataattagttgaattgttggtgttatgatttattttattagtgagttctccgatacaagggtacaatattattaggtggtatatatatgatttaagataaaaataaaacccccacctaagtcagcttaaataatttgggtgattaacaagttcacaaaggaataaaaacataactacactaatctatttaacatgaaaatgaaatatcctaagctgctcttgcagttgtcacaacatcattctaaatttaataagaaaataatcttaatctttgcaaaatcatacatctttatcagaacttgatagaaaattacttaataagagttagacgggcgaataaattaaagtacaaactgcatgcatttatgtagataattattattcgttaagtttccactcttaaaaaaatagatccctaggtgcttaagaacaaggagaacctccacatcattatatatatatatatatatatatatatatatatatatataacattataaaaatgcatgacacaaatcagtgcccaaaggtaataaataacggtttacttacatgaaatttgtaatgcctcactctgcattcaaccaaagctggaaaaatgcaagcaatgagaagcaccattcgaacccaatgagaagccatttctctctctgtatcctctctacaacactttctctaaggccctgtcttaatttgtcgtacttcttatgtcctagcttgtgtgttgcattcacaaaggactggccaacccacacttatatagaccgaaatgggcattgctaccacgtcgttttaactatgttaggtgagtgatggtggcattcttggaaattaagactgaaattaaacaaattaaactagcttatctgacgatatcttgcatgtcacataaagtagtgtataatgggaatcggtgtatatatattttgggatagaagttattaataacctccttaattagacacatatatgttatgttaaattgataatagttgttttggattggttgtgttttgacttccaaacatttctctgttcccccactaagtgaggttttatctagaaaattaaccaattaaagtatggtaatgtagtttagttaaaggacctgattcatcattttgggccttaaacacccttttaccagaagcccttagtagtaaatagtaatgatcttgtatgatatttattttatctagtcattaaagatttttttaataataagtacaatatttttcagggcaagagaaagtacagcatttagcacatgtgaaacataagctcgctctcttagtatttgtcttttctagttttaatatacaaaagacatccatgtctaaggagacttagtaagtttaagtgcaaggaaaatgatatatagtattctatgtcacttgagttaaggttttttgttcaattacacgacttttccctctaattattgttgttattttattttgttccttcaagtagatatcattcattatttttcttcctatagtaatatagaagagtaatgtgaagcattggagtaaaattaaactcgatttctttaaataaaattttaagttaaaaactcacaaattgaaaaaatatgattaaaaggggagacttcattaaaatttgccagtcaaatttcatgataaaaattaatcataaaaaaaaaatcggtatatagttcacaccaatatttgaattgtttgaagtttcagttatttatttatttattttgggtgaaatttaatgtttttgttggtgaattttgattagacaattaaagtttaaagtaatttaatagattcaatttatgaaaattttcaataagaaatgagaatttaggagttttaggcataaaaacaaataaattaatacaggaccatatttgtttatttttaatattaaaagaacttaatttatatattaataaaaacaacattcgatttatttttggaaaaaatataaacaaacttgaaagatcgaaataacacattgcaaattaaagggactaaaaattcacccataatgcatagtcgatgctaaggaaccggaatcttcttgtgaggatcctaattgcttagttcacaaaataaagtattgttgagatatggctttcagagtttagggtcatttatcaggtagaaacacagagggtacacatcatgtttggtttgaaagccaagattaaaccaacattgggtaagtaacaactctgtcacattccggtctctcttctgtgccttacctgctttttatttaatttagtttttttattctatttttttcttccatatatttgcacttttgcagtaggtaacgaactaatacataagtgactagctagataaaccgcaaactacttaacttgatgaaacgtgtattaaaatgatatttaggtatagtggttaaagtcaacttagttagaaatgtacctacatcatcttgcaatttgttgatgttgatcaatcgcgccaaggtggtacgtttttgtttaatatcttagatagaataaagataaaatataaaccgacaaatggagaaaacaagacatgttaattaattgattattaatactagtaataatcacaattgtttttttttaccacggtttttaaggtattcaaatttgattgataaatgatgattgtaccaaaaacttactccatcttttcctttttaactgtcagatttttgaagaatttttgttacttttgtatctattatttataaaaattaatatcacattaattactttttttattgattatatattattatttatttttttatctttaattaatttacatttacgtatatatttattgtggagaaaaagtgaaagaaggtaaaatatgagattctacaactattttattacaaatttacaatataaaaaatttattatatttttttatttctacaaaataacattaaaagacaaataaataaaaaaccagagacagagggttagctaaaccccaaacaaagcgagttctcaatcatctatgctcttctcacgaacccgatccgctttttgttgctgaaccttggacacatcataatttgtttcctgaaaccttttggaactgttttacctctcccctgttgcggttaactccagggacggtcttcctcctaatcttttgtgttttgctcgttttggtttgacactttctgttttaaggatttctgatcagcactgctcctttattgttgactttgcaaattaatttgtttttgtttcagccattttatggctccaccagatatgttttagtaaataaaaaaatttcaattgcttagaaattgagacagagggtaattatttataaacaccatcttttaattcactgaaaattaagaacaaaaacatgacgaaataccaaatatcaaagcaaatggtagcttagatgcaataagcttaatgatgcgaacaaacttaaaatcaaaacaattttatttcatttttctaagatctaaaccattcttgcactcactaatttgtaattaaaatcattggcgctaaaaaaatgtctattccactcgataattttttttttaactttatgtttaacaattttttttggtaagcaaagaaaatttattgataaaaatgtatggcttaaagcacaagacgtgcccagccacccaagttactagacaaagagtataaatacgattcctcccctgggcaaattaagtaattaacaacccatacccttaggcctagttgaagtttgccacctggatgtagacaccgagatgaagctgtctattccacccctttatgtttaacgttaattaatataatttatgaactagaattagaatgtagaaatgacaagttgaagtgttgaactgaatctttaactaggtattttcggaaaataacaataagagttcttgaaaaggaaaaacagcaacaatgagaagtggtaatataaagtaacgctgcttatatttattcctcttgattcattcattgaacattttcaatattaattaatgtgcaaaactaataggaccaaattaacactcattctcattaccagagaagccataacccaattgtgattatcatcccaattatttcttgtatagccagtttgtttatgtggatagccaagctccacgagtatttacaaatataggacaagggatcctgttggctgcttcttggggcattaaaatttcctgcgtcatgattgagaaataaaaaccttcacttggtcctagccgcttccttactttggatctctaaagataagaatacagagtagattatgatctatgtttatatggataactatgtagctaacatgtgaaaatacaggccaccaaactcgatgtatatcatgtctcttattttataatattctttatgcttgtaaagatgtttaaacttaagaaagaaaattatactaatttatgttgaagttatagtttattatgttgaagttatattttattatgttgaatgtgttacttaattagaaaatgacttttgtatcgctttatgcattttcctttcatccaatatctttccttatttaataaataaataaatgaatctacctcattactcttgcattgtactctaaatatattatttcaccatgtaaattataaagtattatgcgagtgccaaacgaaaaggatgtcgaatataacaagcactaacttagttcataactaaccttaatgaagctacaatgacaggtatttttagacatgaaacttcattgaatgatagatcataacttgaaagtatgttgaacaaaatttttatatatgttttatgcattttttttaaatgatgtatgatggggctatcacgtgtgtgaaagtttgtaatgaaataataaggtattttcctatcagagtgaatgttcatcaagattcaactcttagcccttatctctttcccttaggctttgtttgggagagggattttagaggggaagggagggaagggaaaggtttaggtagagagatctccttgtttgaaagttttaatttttgagagaaaggatttcaggatttttaaaactcctctgaaatcctccaaagcctaaaaattgttgttccccctatttgggaggtttttagaaggaaaaataataaaattactatcctaccccagccagtgttaataaaattactatcttaccccagccagtgttaataaaacaccaaaatacaaagcactgaatcacaatttttatgggcaaaattataaaagtatcttattaactctctatttttctctcttaatatatttttaactcccaaacaagaaggaaggaacttccctcattttcctccctttccttcccctcccttccccttgaatctctttcatttccttctcttcctaactcccaaacaaagccttagtgatggatgaactaacgaaaaatatttaaaaggaagtgtcgtggtatatactttttgcagatgatattttgcttgttgatgagaccaaagatgttgttaatatgaaattggaattgtggaaaaacactttagagtctaaaggattcatgataagtaaagacaaaatggagtatatgaagtgtgagtttttacgggtaagagatggtgatcaagacacagtgaatctacttggtcaagaggtacgcaagaaggatgttttagatacctaggatcaatgttgcaaaaaggtggtgagattgatgaggatgtaatcatagaattagagcagggtggatgaaatggcggagtgcatcgggatttttgtgtgaccgtaaaattgcccttaagctaaaaggaaaattctatagaacaactataagaccaacaatgttatatgaagtagaatgttggtcagcacataggcaacatgaacataaaataggtgtagcagaaatgaggatgttaaggtggatgtatagatatacgaagatggataagataagaaatgaagatattcgacaaaaaatatcagtggtaccgatatgtgaaaagatgaaggagcatagattgaggtggtttgaacacgatatgagacgacaactggatgttcccgtaagaacaagagtttgttaccaagagctctacacaaaaagaggtagaggtcgaccaaaatttaccttgaaaaaaggtagttaaacaagacctaatggagtgagatataaattggcggatggtatgtcttaggacaaagtggagaaaaactataagcttggcggaggattaaactcattagtagttctatgttcagtcattcccttattttaattattttcttcttcttttctcccttcttcctttcacctctcttttattttagttttttttctctcttttgtcttatttctacttttttcttctctctttctctttctttgtcttatttcttatttatcattcggttcaaagttgatgttgatattaatgttgatattgatcttcattataaaaataaatttttccgtcccctattttattaaattttgttttggtcttttatctattagaagatttattatgatcctttaattttcaaatttgagtaatgttgtttttaacaaaacagttatcattttgattttgttgcatgattttgaacctttttttttttttttattgtttcaaagatgtaaaacttttctcataagaatcagttgcataaaaaaaggtcatagtaaaaaccttgatggtaaataatattttattgatggttactattttaagggtttacagttcgtttcaaaattatattgtacttaaataagaatacgaaaaaaccttgatttgtttaatattataaaaattaaattgaatgcattaaaattggcatgtaagatttaagaaaaattagtagtgttaaaaattagcatggcatcctctatttctcaatttaatttgtttgcaaaataaataaattagtatttgattttgttagcttctattttggtctatatatagtcttaatatttgtgtttgcaactcgttccagcattacatatttttaaattaatttaaaataactaaaaaggatctacaaataattagtttggaaaatttattagatttatttaaattagaaatatgtgtgaaagtttttgtatgtatttcacattaagcaacccaagtaaccatgtatctcacgtatatatacatcatgataacaacttatatgttcttggtcctaatttttctcatagatgatcccatatgtattaattcaacccaataattcatttcattctcccaaattaagcttaccagcttgattcagtaaaaagtagaaaaaacaaatccttttaaatcccttttctcctttgtgaaagaaaatgaacatgtaggcgtgccacaatgccttctatccaatgaaagagagagagagttttcattttcttcttcctatacatacaacccacacgtcttccgcctaattcaagcaagaagtagtcaatatccatcttatttatctactcatttttctttcactcgaatacctaacttaaaccaaccaactatattaagaatccttaatctaattcaatgtgtgacatttttattttggtcatagaaaaagaggaaaaagaaaattgcattcggccacagaaggaaatgattaaaagggatcaacatcaacaacatctttaatccaagttaattgaggttggtgataaatgaatccaattgtagatacgatgaggttgaaaaaaagaaaaataagataaaagaaaagaaaagaatgcgaaaaaaaggagagggaagatgaagagaaaaaggactaaaaatgaattatctggaatatagagataataacggatttaatcctccattaagcttgttctgtatgttttctagaacacaactgtatagcacggaagtgctacgtgtttactgtttgatcactctaactctgcaagtcaaaggatatcaatggagaatgataccttgaagcagaagatcacagagatacaccaatggacgtggggtgtgtgctctgtgtaattgaaggagagagagttagaatgagtgtgtacctttcaccaaagattatcgtgtatttataggcagattacctcgtaacgggcatcggaactgattcctggatttccggcctcatccagcacgttctcaacgttcggcatggaccaagtcagcctccatgttctatgaataagttacttgcacgatcattaataacaattggacccaggcccaaactataacgactatgatagttcaaatacgacaaccataacagttgccccccagcccgattatcaagtatacttggtagccgggatgcatcaagtgattttgcaaccttctggataacaataaatccgactaaactatttggataccatttcctgtcctcaacactccggataacttttccgactacatttatctggatacaattcttcgaacgctttagggacatactgccgtaatcatgcgttgttccgacaacattcgggattgtgtggttatccggatagaaaagcatttccggctagacttttgtggatacttgtatctggattttactgagtagaaacgtactcaactgaacttatccaaataggtatgttcagatttatcctgagtaggtaatgtatccaggttgtcaatgacgtgtccgaaaagtctattgaccttcctgattaacattagttactattcctgtcttcgatggcaataaatgcccttaaaaaatctgtcgctttattagcctagtaatgattaccattgacgcgattttactttcttgtcctcagaattggacgtgcttttaccatgatgcccatgtgtcatttcgttgtggagattgagccgtttccttccttatggtggttactgcaagttatcattacatttcaaattttacttccaaaaacccgcaattctgcctactttctctcgtgcttgtcacttctgcctattctctactgctattttctctcttctctcacagtatcctcttgagcattctctcgcatttcctgcaagttcccctttcgttcatcttcccttcaaccttcaattccttattatcacaggtaccttcttcccttttctctctgtatcatttgttgtttttacattactgtgattctgtcgatatcaggattttagggttgcatcatattttctttctatattttcttgctttctgggttcttcttggcgctttgcaatcatatcattctcttcttcttcgattctctctttgttttccttaacttgtcaagacaatgacccccgaagaggaagcagagataaggaacaaatttggccctagggccgcctggttattattcggccttccacttccggcgggggaaaacgaaagtgacccccttcgccctcataccggaggttcttcctcctccggaaaacaaaaggtcatcgccggtcctggcggttcaatccctttatttcccccgccccttccggttcctgtaaaccctaggccaaccttaggcccaaccctaggcccaaccttttctagaactctaccttctctggactcctcggttcttgggcccaaagttgattctagtagtccgcaaggtctttctttagaactcccttgccatcaccttaaccctccagttggcctttctccatcttctgatgaggaatcatcttcgtcctcggttgaagtaatggaggttaagtattatgcctatattgattgtgtatccgaggccattcattatgttcaaattggttccgacgacattgccgattcaattttgaggtcatgtcgtcataaccctattttgcgtcctgctttcaagaatttgcaaccgggatcgcatactcgctctgtcgtcgacggggtttcggcctcagtttcttatgaatttaatgcgttacctccaggtacgtttactaacttttatttccccacttcattttcgtaggtataatgggtgttacctcggaaactgtggacgaatctgcctctgtagagtcctattcagatgtgcccccagcattagtgtctaagttcccttgggtcacttatgaagtccttcgaacttcttctgtcctgaccttcccagcatagtgtcgattctcgtagggaaacaagatgggttcgcccttcaagctcccctgcccggtgagcccatttgtgctcaacgggagggtaacaaccccaactttttcttcttttttcaagatgtcataacccaaataggtattacctttcctttttcctcttttgaaattgaagttttaaatcatctccgggtagctccttcccaactccatccaaatagctggggatttattcgtacttttgaattattttgtacagatttaggaatcccctgcacagttcctctcttcttttactattactctccacatacccctagaatgggtaaagagccttctgaccggaaggggtggatttcctttcgtagtcagagtaaacgaaaactcttcgatcccttttcggactccttccggggcttcaaagacaaatattttaaggttgccgcggaacctcatcgacaacccttcttcttgtccggtcctgagtcatctgatgtagaatgggtttttcccttgtactggtcggatgatcattacaaacaggatcattccaattaccggtttgtcgaagaggatctttccaactcggatgcctcttctgtcttcgtgatttctgagtttataaacactcatggtcagcctaaaacttccaactatattggcggtggttgttgaaacggtctgcttcggtgactatattatcccgtagtttataattgtatttgtattaattgtgatgtttcttgattgtagccggaatggggtcacgaccagctcctcctaaggccaaaaccgacgtcgcccacatttccaaaccaactgaagtcaagggcaaaggcaagaggccggcaactgacaaactcggtgctccgtccaaaaaacgtggtgcgcctccttatagggcattttttgacgaaggtgctcagaagacggcgtcaaatgctccgactgctccactgtctccacccttgacaaccttgaccccggtttcggtgatcgaaaccgtggatcttactgtggcggatgttcgcccacgtactacccccgctgctgactccgatcaccttgaggcgcgggttcgctcggataatgtatggaagaagggggtcactgagtgctgattactcgagcctcttgaatgagtgctgattccagcgccagtgtctcgttattcgtttcctctccatcccgtagcacttgactccttcgccatgattgtagtccgacctcaactggaatcatggcttcgcttccataagtcatcctgaatggagtttctcccgttgatgattgaaccgtagttcggattccccatagagcatgatataactattccacccaactcggtccggcgtcgtgcatacgttttcgtagggctttcaagattgttttatttgcggcctccgcttgtccattggactgggggtgttcgaccaacgcgaacctgtgtcggatctggaagttggtcatcatttttcggaaccctttgtccgtgaattgtgaaatggccatggtgctgaaatagactgtaactcttccggaggtgacaaaagtcgcgatgcatgcatctggcaattctcgcatttctttacgtggtcgattgcatcagctgccatcgtcggccaataatacccggctcagagtgcttttcttgccaatgacctcgcccccatgtgcgtccgttaattccttcatgtatttcggatagcacatactcgattctgtctggagcgacacaaaccaatagggggctgtgcaaaccctttctgtataatttgtcgtcaatgattgtgaacaatgctgccgcccttgttaatctccgagcttccagtgtgtcgtcgggcaacattcctttttctagataatcgattatcggacgtctccagtctttgtcggatgtgatcatcataacacaggagggctgcaatacctgctgctggactacagtccgattattttccgggctttttgtactcgctaattttgacaaaatatcagccctgacattatcttccctaggaatgtgactgatcgttacctcggcgaattctgccataagttcttttactcttcccaggtatttggccaataatggtcctttcacctgataacgaccttctatctgagctgcgaccaattgagagtccgtgtatacttttaccttgccagcttcttattcttttgcttgcttcagcccggctatcagtgcctcgtactcggcctggttgttcgacgtccgaaaactcaactgtagtgagaactccgttgctactccatctggattctctattatcaccccggcgccgcttccctttgtattggatgatccgtctacatatagtgtccaccaatgttccgtttccaaagtaattggggtgagttctcgtacaaaatccgctagcgcttgtgatttaatagcacggcgggcttcgaattttaagtcgaactcggataactggactgcccaatttgtcattctttcggccaagtctggcttgtggagtacttgtcgaataggctggtccgtgcggactacaatggtatggctctgaaagtacgggcgcaatttcttggcggctacaattaacgcgtatactaatttctccagtttctagtatcgtagctcggaatcacgcagagcctggctgacaaagtaaacgggcttctgttcttccttgatctctcttatcagtactgcactgatggcttcctcgcccaccgataaatacataaccaatatttccccttcttttggtcttgacaagaccgggggagatgccaaagatcgcttcatatctgcgaacgccacatcgcattctgggctccattgtatgacggcttgctttttcagcattttgaagaaaggaagggccttctccgccgacctcggcatgaaacgtgttagtgcagctattctccctgtcaactgttgtatttctttctagctagtcgggaattgcatatccaatatggcgcgacacttgtccggattggcttctattcctcgattcgttagcataaaacccaggaattttccggctccgactccgaaagtacacttcaaaggatttagtcggatgttaaatttccgtaactgactaaatttttcctctaggtcatcgacgtgtcgaccaacttcctcagtcttgactatcatgtcgtctatgtagacttctatatttcgcccaagctgcggctcgaacaccttattcatcattctctgatatgtggcacctgcattttttagtccgaatggcatgacgttgtaacaataattggccttgtcaccgataaacgtcgttttgtcttggtcttccgggtgcatcgggatttgattgtatccggagaatgcatccataaaagaaagaattttgtacccagaagaattatcgaccaactggtctatgttcggtatggggtatgcatccttcgggcatgtcttgttcagatctgtataatacgtacagaccctccattttccatttggtttgtggaccatgaccacatttgaaagccaagtggtgtattgaatttcccgtataaatccagcttgtaacaactcatcgatgtgattgtgtaatgcctgtgttctctcagggcccagcttccgcttcttttgttctactggttttgatcccgggtacatggatagtttgtggcagcaaaccgcaggatctattccgactatctccgacgccttccatgcaaagacgtcacgattctttatcaagctctgaattaatgtattcctctgtccgggttccattgtatatccgacattagtggtgtgactggcctcggttcttatctgaaccttctctacttcttctgtcggctctagcctccattggtctggtgcttcccgcatgtccaattctactatgtttatttgtcgtcctcgggagcacttgtcatctgtgttttcccgatgtcctgtccttcctttattttcactttctcggactgtatcataatagcattgccgggaatttttttggtctccgcatattgtcaccacctttccgtttccgcctacgaatttcaacttctggtgtttggttgacatcaatatatcccacttatgtatagtgggtctgcccaaaatcatgttatattgggacggacattctgccacgacgaattccactatttcagatttgaacgcttcttttgttcccaaagttagtcgtaaacggatagatcctttaacaacggtatttccaccattgaatccggttagcatggtcctgcatggctttaaatcttcctcagccaggttcatctttttgaaagcttgccacatgcttatatcggcagaacttccgttgtcgacgaacatttttcttactcggcaattgcctaccgttgctgatatgactaatccgtcctcgtgtccgggcataactccctccatatcctcccttgtgaagtacaagagtggttgttcagcttcccccgtttttactttaaacttcggctgagttctgatcgacaatacctcctttaaatattttttcctctgattggccgtatcgcctcctccgcccatcgccccggatatcacattacactcaaactcaggttccgggaatatgtcgttatcttcatgggcttcacggggtctctttccctcatctcttttgtcatgttgattttcgtccccctttcgtttgttctttcttccctgtgtccggatcacatactgcttcagtcagccttctcggataaacttctcaattgcatctcgcaaatcccagcattggtccgtggtatgaccgggtccattgtggaattcacaaaagcgcgacctgtccaaacctgctttgttgaatacgggtcggggtcgttcaacctttttcatctcggtgaatgcgacctccttccagatctgtgagcgggatacgttcaatggggtatacttctcatatttattctcgtatctccccggtcgaggtttcatgtcgctattccgagctcgattctccgggtacaccctatttcttgggggtgggcttctcctttcgtgtcgctcttttcctcgtcccgagctattggcaacctccatttgctccagttccaagtatttctttgcacgagcccagaattccatcaaagattttaccgggtctttatagatagacttggcaaatctcgacgatccgttgagtccggctgatatcagatatacgtgaactctttcttccagtccattgttgcgcgattacgcgaatgcgtttacggcaagtgcaccgatcgtttaacaagtaataaaagggtaagtaaagtatcgtctccacagggattggaaagatttctcaataattataaaagttatgattgaacgagaacagtagaatacgcaagagtttgttggatgattgtgttgaattaagtaaagaaattaaacaaaacagtaaattaaatcgaaaagattaccaatgagaagtgattgtggtcaggcacaatcccttatgagcgttacctctttcaattgactgatgatttcatctttaagtttacataagacaagtctctcctaaattcgtcaatcctagactcttaagagcattaactagcgatttcaccctttaattcgatcgagaaccctaaccttctagcgattctgtcaaactaagaagtcaaagaacaattcttatgggttcgtgttatgtttattcagagaataagtctttcctattttagctaatccctaatgtcttagtgaattaaccttttgaactgatttcataacctaatgtcttagtgaaactagtgaattcaagaaatcaaagaacatattatacctccgcactcacgcatccctatgtctaggtgaagaacaagtgttaatcttaacaagtctgatattataattccaacgtgtccattgcgaattataactctctatacctattcagagtgatcaattctaaacaagattatgattaagcacagaaaagaaataaaacaaacataacatatgcattaataccagtcaatttacagagggaaactcataagttcatggcctttccacaacaaggagattagctagccataggcctcaagaacaccaaaacaattggatgaaacatgattctgcagaattggcttcaatcttgattcctagggtttgctgtggaagattcaatctatggaagtgtatataagagtgtatttgtgcaagagtatctaccagtgtgtctaaaagctcagaaaacacccttatttatcgaatgttttaattacagtaacttatcataagccttgtcctattttcgaagcagtatcagtttaattcaggcaagaaatcatggtcacgcgactcgcgcgcgacaccacgcgagtcgcgtgacatggcagtgttaaatggcgcgacatgcgtgacttgtgaagtgaatcgcgtggcttcacagagctgaattggctttttcttgaagttgtcacgcgactcacgtgaaacatggcgcgagtcgcgtgatatattctggacgtccaagtgggtcgcgtggaagtggcgcgatacgcgtgaggctccagtcactgttttctcctttatttgctcttattctcccttgttttggcctgcaaacacttaattaatattaaaatgctttataaaacatagtatcctaaatatgcctaattattatactattttctaactatttactctaaatatgacctaaactaatgctatatttaagatgtgtttgcaacacatcaaacaattcccagatttgaaagttgctgtcctcagcaatagaaagaattctaagacataagcatgaatcaataatcaacaaaaactacacttctcaatcataaaatcatcatgaatgtataatttactcagttcaatcttccatgatgctttcattgatatcaacataagaactacttgagtttttctcacggatgtgtatatattcactcattcactcaagtgtttcaggttataattaccctcttactcaacatgattaaagcattaccataggcttgaaaatattctcaacagatgcaatcatgacttgatcagaaggtcttttaaagcttgtaatgtggcttggctagaggtgggaatcaatttggaaaaagtagctcaatcagaggcttagtctagttccctaagtccaagctttttgtagtcttccatactcttgtctttctttcttcaaactggtacttttattcaaattaacatactactattttctttttactttttcacattttttcttatccaacatttttgtaatcagaatatacacattcttgcagctttttgaatttttccagctgataatttcaactttttcagtctattcatttgatttctcttctctttcttcttcttagcacttttctgacatggacttagttcaccttcttaagcctcaaacggttagagatatttggtcatggcttaatcttgggttattgaaatgaaggtttcaggctcaaatttcaggttcaaaggaaaaattttattcaggttggttaatttggccctagttttcagaataaatcatgccttaatcatttcaagtcacacctgcacttagagaaacaaatcaagttctagaatactaataagcatggagtctctcagaagaaaatttaccgacatttggcccaaattcttacaggtgctgtgactcaagtcgttctcaatcgactgcatatctggcatcatttcaacattcaacatgagcttcaaatactatcaatcaaattctactcatacatcatgcagtccatatctcttatttcatctacttaattcagagaaatccgtctattaatgagttcatttgctttcttaaatctgaaaaaattttgtgtgctgcttatttttatttgtttgaaaaaaaaaatctgattatatgaaaaattttcaaaaattctgttagactttctttgatccttgattgtgatttgcgaaataatgcgtaaccattcccagatttatatgttgctgtccccagcaaccacaaacttggtcatagcgctttggaaaattttaagcattattcgtaaaatcgcattcagttctctatcgtcaaaacagattgataagaaaaatgataactataactgtactatatataatatcatgcagtaaaatcaaattatgaatactatatatgtctatgaaatgtagatgtgcagaaaaataaaatgtatggaaaatgcagaatactaaaaataacaactcaaaacataagtctaaaaataaagtaaaagtcctgctcagtcatgatggtctctgtcctctgcagccatgtctgtgtgctcggaatgtaatggctgtgtcactgcggtgtctgcatccgatgctaaatccaagggatccatggctgcaggaatgggctgagaaggctgtggtggatgtgtaggaattggagtctgatactccgacgggtcaatacccaaatgctggcaaacagctccccacatcctcgtctgcagggcaagctgctcactctgaaactggagttgggtcctaacataatgctggaagtcaatgaagctcggtgagtcctcataaagcggggtacgtgtgggtaaagctggtggaggcatcgaaatatgtggtggaggactgggtatggaagtgtgtggtggtgaggtcggtggtgaaggaaaaactggtggtgagggcactgactggtcatgtaggtccggctggggatcatctgccggaagatctcgaggagaggcggcggctatggcctcaggtgtgagcttagaagctctaaccacctgctcgtttgaagcggcgctcacagcagtagtgtaggtcttcaacgtcataagtggcgcaatagggacatccatgtcctcatcctcatcgatatggaccccagcgtgccggcatagaagtaagatcagtgaagagtggccgagccaggaccgtgtacctacatctagtatcatctgtaggatccggtcagataagacagaagagataatgaggttacctgcatcccagagaatatataggaggatggctcgctcaacattcacatcggtcaaattcctggagggcatgaccgtgtggttaacaaataaatgccaaaatgccgcgtctccaaccagctcggactttttcaatttgtccggtatatagtccatgctgggcttcgtctgccaagctgagtgcaagcatgtgatagctcggcggatggtggtggctaaatctgggacatcatcattatacatctttgtaaccgcatctggctgcatgtgccagaataatctgatgaagtcgcatgaggcgtatggatcgtagtcagtgtcgaatagagcctcgatggtcttctctccgaagggtacctggactcccctcacccaagagactctggtcctgtaaaccgtgtcctgatccacattggagagaaactccttgaggatcatgctgctgctgggctccgggaaggatacaagcttctgccaccggcgtctgacgatgacctgtctgatgggatggtcctccgggaactcctcccacatgatcctcctctccctgatgatattcttgggtaaataccaagaatcgaatttagcttggcactctgcagtgcggaagcggagttcatcaaaatcggctgctcttgatctcttcttactgctgccttcccctgtgattttcttctttcctttggatggtttggtttgttcaacctgtttaccctgcaaatcagaaaaattttcaaacaatgttcatcagttcaatgaaatatgcataaggatacagggaacagtctatcatttcatgtgaaagtccataataaataagcaattacacttaggattcccagatttggtgtattgcatatatataagtgtatagcgattaatatgcatatgcaatccaataacaattcccagatttaatacctttggtgttcttatttacaatgagcataatgtttccaattttcgagcacataacaattattttaactcatcagatatatatataggcctatggatatcaacaataacattcatttataaaactgcaaagtatttggaattccccaatgcatatctgagtacacatacatctctaaagttcatatactgtctagtcctaatccctactattcccagatttaagttcttgccatagtaatgtagatacaaattttgcttaataccatgggaaagctaatacaggaaaccagatcacaatttaattgaccatgtgcaatttcattctaattgtgtgagcacttgtatttgccaaccatgtgtgtttccttaatgtggagattaaaacaattaagcattgcttgctttatgcttatgtataacaatcctatattaacggacaaacatcaatgttgagtttgaattcatatatatataacctacatttcccaaatttattacccttggtggtcttaacaatatcatctggaaacataaacatcaattcatgtccaagagtgattagcattatagcaggataggtggttcaagcgtacttcatcaagtttgacatagatatcatggagacatcgaaattaatttcaggcactaatatattccatatcatcaaaattatagcaaggataatccatatcaagtgctcaccttgagttctatgcaaaatagactttgtagaatcatgtgtcattttaatcatcaacaatgttcattcttatttcaaggtatccatatatcattccattgctattctaattgaaataatgtaagcattcatatttatccctatgagtgtgtgattcatgtgtgtatcaaaccacaaggctttatacattcccaactttatgctttcaattgatcaattgacatgtgttcatcaaaattataatccaggttagatgttacattgtgctcattaatcagtcttctgcctaaggggttcatttggttacaaaaattgtttaaaaactcactcaggcatttcatcgaacaagtggtgtgcacaaaaaatggataaacatgatgtgtgtgttgggtagatggcttaacccaaaaatttttcaatgaatttcagaccacagacacaagaataagtagaagcatataattagatatataaatttgcaaatgtggctatcctaagatgttcagaaggtgacacttaccttatccttggccatgatgcttgtgaagatgaatgcagagatttttagcgcctagaattgcactgaaagacaacaccaatgtgtggtttttatagaggaagtggaattaagggagttattgggggttaaaggagtttgagtgagttaagggattgagggcgagagggtcggagggaattttaggaggagagttatgaagaggcgcgagtttgggttctattttaaaaactgatttcgcgacatcacgcgactcgcgccgattatcacgtatgtcgcgccatgtcccagtatggtttaagtgagtcgcgtgactttccacgcgactcgcgtgaaattgggcaatttggttctgttgtttcacgcgatacacttggttttccacgcgactcgcatggattgaactgattgtctgttgaaattctaactatgacgcgactcgcgtcattaaccacgtaggtcgcgtgggtttgggcattttggcactgacctctggcgcgatacacttggtgtttcacgcgactcgcgcgaattgacagaattaatagcgcgatatgcgtggttggtcacgcgagtcgcgtgactttgcattttctgttttccctttatattttccttccactctctaaattctcaacatatagctaaagttactcctaattggaagaatttaactaagattactaacttatttagacaaaattgaaatgaattgaagtaaaatatgatgcatgaatttaaattgcatgaatcgaaatctaagactatcagctgaacttaacttatatacaatttcaatgcttatttaaagtccttaagctagacttttacgtcaattcattcaatgttagcttgaagtggtatagagcttgagtttctatccacctctcctccaaaataatgtttcagcctatagccgtttactttaaaaactttttcaccatctagagctgaaattgctactgtaccatagggaaagacttctcttaccagaaagggtccagaccatcgtgactttagtttacccggaaaaagcttcagccgggagttgtatagcagcacttgttggcctggaatgaattctttgtgcctaatgtggttgtcatgtcactttttagtcttttccttgtagatgcgagcattctcataagcttttaacctgaactcatctaactcatttagctgtaacaatctcttttcattagatttggttagttcaaagtttaggaattttgttgcccacaaagctttatgttcaagttctagaggaaggtgacaagacttaccatagagcaattgaaatggagacataccaattggagttttgaatgcagttctatacgcccacaatgcatcatccaatttcttggaccaatcttttcttgatgctccaactgttttctctaaaattcgcttcagctcacggttggaaatctcaacttggccactggtttgaggatggtatggtgtggctactttgtgttttactccatacttggctaacaagctctcaagatgcttgttacaaaaatgtgttcctccgtcgcttattatagctcttggtacaccaaaccttgtgaaaatgtattttctcagaaaatttataactaccttggcatcattggttgctaatgcagtagcttcaacccattttgagacatagtctacagctactaagatgtattgattgccaaatgattcagggaatggtcccatgaagtcgatgccccatacatcaaataattccacttcttgaatgttgttcaagggcatttcatctcttctcgaaatgtttccagttctttggcaactgtcacattgttgtacgaaatcctttgtatccttgaatatagttggccagtaatagccacattgtaggatcttttgtgctgtgcggtttacaccgaaatgtcctccgtagtttgatgaatggcagtgccaaaggatgtcgggcacttcactttcaggtacacacctacgaataatattgtcagcacaattaaagtataagtaaggattatcccagtgatacttattagaatcactcagaaatttcttcctttgctgccacgtgaatttttcaggaatgattctagcagctttaaagtttgccatttcagcaaaccatggggtgactccaacagcaaatatgtgctcatccggaaaggcttcatttatttccagctctggtccatcttgcagtttgttatgttgaatgcgggatagatgatctgcaactttgttctccactcccgctttatctctaatttctaaatcaaattcctgcaagagtaacatccatcgcaataaccgaggttttgcatcttgtttatgcagtaagaatttcagggctgcatggtcagtgtaaatgatgactttagatcctaccaaataagacctaaacttatctaaagcatatactacagctagcatttctttttcagtagtggcatagttaacttgtgcctcgttaaggactttactagcataataaataacatgcaacttcttctcttttctttgtcctaggactgcacctactgcataatcgcttgcatcacacatcaattcaaagggcaaaccccaatctggagctgttataacaggtgcagtagttagcttttgttttaaatcattgaatgcattaaggcatgtattatcaaatacaaattctgcatctttttccagcaatttactcagtggttttgcaattttggaaaaatctttgatgaatcgccggtaaaaacctgcatgaccaagaaagctacgaacaccgttaacattaataggaggaggtaatttctcaataagtaagagtttggctctatccacctctaatcccatttcagatattttatgaccaagtactataccttctctaaccataaaatggcatttttcccagtttaaaactaaattagtttcttggcatctttttaacactttagctaaattaagtagacatgtatcaaagcaaggtccaaaaacagaaaagtcatccataaatacctctagacctctttcgaccatgtctgaaaaaatagaaagcatgcacctttggaaagtggcgggagcattacacaacccgaatggcatccttctataggcgaagactccgaatggacatgtaaaggctgtcttctcttgatcttccggtgtaactggaatttggttatatccagaataaccatctaggaaacagtaatagtcatgaccggctaagcgctccaacatttggtccatgaatggaagtggaaaatggtctttacgtgttgcgtcgttaagccttcggtaatcgacacacatcctccagccagtgattgttcttgatggaattaattcattcttttcgttttgaatcactgtcatcccccctttcttggggacaacttggactggacttacccatggtgtgtcagagattggataaatcatacctgcatccaaaagcttgacaacctcttttcttaccacttctttcatgaccggattaagtcttctctgaggttgtcttacaggtttaacgtcagtatccattaaaatcttatgagtgcaaaaggaaggatttatacctttgaggtctgaaatagaccaaccaatagcggacttgtgttccttcaatactttgatcagtttgacttcctcatgccagtctagtcctttgttgatgattactggataagtttcatgctctccaaggaagacatacttcaaatgttctggtagttctttaagttcaaccttgggtgcatcggctaagatatcatcgtctttaatctctagctcttcaattttctgctctgctggtgttgtttctgcattgttggagtcagttactgcagctttttctcccaatgcatgtgctgtttcaagatcatctcctgctgcagaattttctgcaaacatctctgcactagtagactccaaatcctgcatctgtgtttgtgctaatgctggtgatttttctgcatgattagtaggtgctggactgattgcatcttgtgatatatctccttcagaaattgctgcaacacttgacttaaaacctgcacaaatagcgtcatccaagacatctatacgaaaacaatcatgctcatcgttagggtgttttattgcatcaaacacactaaaaactacagattcattatctaatctcagctctaatttgccttgttcaacatctatcaaggctctagccgtggctaggaatgatcttcctaaaagtaggggaatttcattttccccttccatgtcaagtacaatgaaatctgcaggaaatataaatttgtctaccttaactagaacatcttctatcaccccggagggtgtccttaaggatctatctgctaattgtaaagacactctagttggtttcaattcagttatgcctagggacttacacatagacaatggcattaaatttatgctagcccctaagtcacataaggctcttcctacatcaatatttccaatagcaacaggaatattaaaactccccggatctctcaatttgggagggagcttccgttggattattgcactgcactcctcagttaatgctattgtttcacactcctttagcttcttcttgttggagaggatttccttcatgaactttgcatagttaggcatgttagctaatgcctcagcgaaaggaatgttgatgtgcaacttcttgaacatgtctaagaatcttagaaattggcgtttctgttcttgttgcttggtcaagataggatatgggggtttttcaaagcgtgaaaaatcccacttcttcggtggttgcataggatctctttcttctgaattttctggaactttctccttttctttctcagctgctgcagtatttttctccacctccggaacaattgattcgggcttctccggagttactaataccttaccacttctggttgtgatggctttagcatgttctcttgggttcacaaccgtatcacttggaaattgaccttgtggcctctcagccatttgttttgcaagttggccaatttggttttccaagttcctgattgaggcatcttgattggtccggtgagctctcgtttcagctatgaattcagtggtggtcttagtgagctgtatcacagctttttctaactcggacggttctttattcggaataggagggggctgcaagtagttgttggacttgtaatccaaaccacctccttgaaatcttctaggatagttgtttccggctgcataattgttgttcctctgatattgttgctgctggtatggttgttgttgccgccgttgatcgttccaaacgccatttacctgcacagggtcagcaccaactaaaataggacaagtattggactcatgctcaccttggcaatactcacatacaacatacggttgacttgtgcccacttgtgctgcagaaaattgtaatcggtccattttctcgctcaatttggctaattgttgtgctagaattttctgctccgcaagcattgcatcattggtattcagttgaatgggttccctctttggctgagttgtatgactttcgttctcagttctggccaaagacttgatcaactcatatgtttgagcggcggttttagatcttatagtaccaccggctgcaatatttaccatcattcttgtttcaggagtcatgccattgaaaaagattctgacctgtttacctacaggcatgtcatactgtgggcatctccttactagtgcttggaatctcttccatgcggtgcacaaagtttctcttccactttgagtaaaattggtgatctcgttcaccaatctattgtatttgtccatagagaaatattctgcgaaaaatcttgaaactaagtcatcccatgttgctatactgtttgaggtttggcaattcaaccatctcaatgcgttatctttcacagcaaatggaaataagctcagtctcacggcatcatcggaaactccctggtgtctaatagtgtcacagattctgaggaatctatctataaaatcatgagggtcttccgaatcatctcccccaaactgactgcgctccaccaatgatatcaatgaaggatttatatcaaaatggtttgcttggattggtggtctcacaatactagagtttggtcttgtgaacataggagccagaatatcctccatgagttcatcttcaggccgtagtcttggtgggggctgattacgtggatcttcagccatctcttccgattcgaattcaggaagtgaatcgaaatcgaaaagttccgcttctcttcttttctgtctagctaacctctttcggagggttctttcaatttcagggtcgaattctaactcttcagggctagctgatcttcgcataaaaactcaagagaagtggttagtagctagagttcaatcacaaaattcaaaaattactgaaaaattctgttaccaatccccggcaacggcgccaaaaacttgttgcgcgattacgcgaatgcgtttacggtaagtgcaccgatcgtttaacaagtaataaaagggtaagtaaagtatcgtctccacagggattggaaagatttctcaataattataaaagttatgattgaacgagaacagtagaatacgcaagagtttgttggatgattgtgttgaattaagtaaagaaattaaacaaaacagtaaattaaatcgaaaagattaccaatgagaagtgattgtggtcaggcacaatcccttatgagcgttacctctttcaattgactgatgatttcatctttaagtttacataagacaagtctctcctaaattcgtcaatcctagactcttaagagcattaactagcgatttcaccctttaattcgatcgagaaccctaaccttctagcgattctgtcaaactaagaagtcaaagaacaattcttatgggttcgtgttatgtttattcggagaataagtctttcctattttagctaatccctaatgtcttagtgaattaaccttttgaactgatttcataacctaatgtcttagtgaaactagtgaattcaagaaatcaaagaacatattatacctccgcactcacgcatccctatgtctaggtgaagaacaagtgttaatcttaacaagtctgatattataattccaacgtgtccattgcgaattataactctctatacctattcagagtgatcaattctaaacaagattatgattaagcacagaaaagaaataaaacaaacataacatatgcattaataccagtcaatttacagagggaaactcataagttcatggcctttccacaacaaggagattagctagccataggcctcaagaacaccaaaacaattggatgaaacatgattctgcagaattggcttcaatcttgattcctagggtttgctgtggaagattcaatctatggaagtgtatataagagtgtatttgtgcaagagtatctaccagtgtgtctaaaagctcagaaaacacccttatttatcgaatgttttaattacagtaacttatcataagccttgtcctattttcgaagcagtatcagtttaattcaggcaagaaatcatggtcacgcgactcgcgcgcgacaccacgcgagtcgcgtgacatggcagtgttaaatggcgcgacatgcgtgacttgtgaagtgaatcgcgtggcttcacagagctgaattggctttttcttgaagttgtcacgcgactcacgtgaaatatggcgcgagtcgcgtgatatattctggacgtccaagtgggtcgcgtggaagtggcgcgatacgcgtgaggctccagtcactgttttctcctttatttgctcttattctcccttgttttggcctgcaaacacttaattaatattaaaatgctttataaaacatagtatcctaaatatgcctaattattatactattttctaactatttactctaaatatgacctaaactaatgctatatttaagatgtgtttgcaacacatcatccatccacctgtaaggtggcctccttgaacctatccagatagctctgcaaagtttttccagttagctgtctaattttacctaaagtaaactccgactttggttgctttttgctagtcgcaaaattcaacaagaatttctgcccgaaatctttgaaatccctaatcgaacgcggcggcaatgtgtggaaccacgtatgtgctggcccggtcagcgtcttaacaaaaatccttgatatgatgggctcttcaataccccatacacacatttgcaaatcaaactcgtcaatatgtacctggggatcctgcgtcccatcatactttgatagaaaagacccatcgaagtcatccagatatcgagcactcacgatctcgtctacaaacgggctgttgttttgttgtccccggctatacttccggcgataaacaggtccttctctgccacgtgtaaccggttcgctcagcttgtcttgttccataaatctctgatcgatccgttgatcttctactccgtctactcgttgtgttcggactgcctcagcctctatttggctaggctggtttccaccaacgttcattcggttggtcaatgtctcatttctgtctccaccgtcctgcgtcagctcctgtacccggggttgttcccgagatcgtccttcaatccgtctttgatttccttcgtggtcagtattacttaaatgattcaaatattccctcaaatcatgggaaggggatgatggtttttcaacacgattcgaggcttgtacttgctctaccatcttctgtagtttatgttctaactgtgccattcgttgtgtttcagcacgcctccactcctcattacgttcttccatctggcgtgcaatgtcacgaatatcctctcgcctttgtaaattttgtcttttctccatgttctcaattcagcttagaatcgaattgaggacattgctgactagctgtcctccgagttctccttcctggctcattcttcacgccggttgagtccttctttgctctgtctgagcaggagaggaggcttaatcggaaatagcttctgtcacatggactccttctctccgcaccacgttctgattctccggcatgaaaatctctctgttcggtatctcggaatgtggtacagaatgactgtttcttgtgtttaccattgttgaaagcgtgggactcgaagtttatcgttccccacagacggcgccaatgttctgtatgttttccagaacacaactgtatagcacggaagtgctacgtgtttactgtttgatcactctaactctacaagtcaaaggatatcaatggagaatgataccttgaagcagaagatcacagagatacaccaatggacgtggggtgtatgctctgtgtaattgaaagagagagagttagaatgagtgtgtacctttcaccaaagattatcgtgtatttataggcagattacctcgtaacgggcatcggaactgattcttggattttcggcctcatccagcacgttctcatccagcctccatgttctatgaataagttacttgcacgatcattaataacaattgggcccaggcccaaactataacgactatgatagttcaaatacgacaaccataacaaagcttataacttttttccattctgtcctaagacacacagcccgctaagttttggtaagttttgtttaactatcatttcctaggtaagttttggtctacctctacatctctttgtatagaacttttggtaacaaacttttgttcttacaggtgcatctaggggttgtctcattacgtgcccaaatcatctcaatctatgttccctcatattttcactcaccggtactactgctacctttcgtcgaatatcttcatttcttatcttatccatcttcgtataaccacacatccaccttaacatctgtctatgtgctgaccaacatttagctccatataacattgcaggtcttagaattgttctacaaaaatttccttttagcttaagagaaattttgcgttcatacaacaacccagatgcactttgtcatttcatccaccctgctctgattctatgatttacatcctcatcaatctctccacatttttgcaaaattgatcataggtatctaaagacatctttctggggtacctcttgaccaaatagatgcacagagccttgatcaacatcttcttaccaatgaaaactcacatttcatatattcagtcttgctccagcttaacgtgaatcatttacactcagaagtgtttctccacaattcaaatttcctattaacattgttttttatctcattagtaagcacaatatcatttgcaaaaagaatacattatgatacttcctcttgaatatcttttgttagttcatccatcagtaagaaaaaagagttaaggactaagagccgaaccttgatgtacacctaccgtgacaggaaaataacttgatgttccattacaagctttcacatatgtggtagccctatcacacacatccttttagcatttacattgcacaagtttcattagatttattaatttttaaaaacaatggttaagattttttcatccttttctctttccttccttctttttttccagatttatccatttctccatcttctggttacttaacactcaccgttgttttatcaaactcaacaaccacagtgccttccagttttcccgaactcaacatctgtagaataaagatcataagcaggaaatcaatttccaaggcaaatccattatctctattagaactttcaagaacttgctccttccccaaattataataattttgtaaatcatgtgttccttcatcaatttaaacatatggatttatacaattccaactagattaattagatgcataatatattatctagatacttgactttaaatcaaacgtcacaaaaaacatattttagatatttttttaacctatgagatttgcatttcaaaattttattttccatccaaaacccatgtgtttatcatacccttggtggaccataaaaagcaatgaaaaatattcttcaaaattgtggctattgttataagtagctatattgtccagggtccacaaaatacacgtgacaagtgacgtggagttccaatacgcacgtcagccctgacataggagcaatgacatcttgtccataacagtcaggctactgggaagaacaggttatctctaatacatcattatttgaataataacgataatgttgtaacttccttatcaagtggcagttacttaattatctataagctatggattatttacaaagtgtaaattatctactagcaattatatataagccacaacttatttattagctattatctacaaactaatcaagggttgttacaccactgtaacaacctcgacaaataaggatttgcagctcctactccactctataagtatcaggttccatctcacccttttgatcacttattctcacctaactcacatacttacttgagcgttaaagtcctatattttgcaggtttcccctcttgtgctcctaacaaatggtactcatcgtccgacgtacgagattgtggagccccttttggccatgtccaccctgatgtgagtcagctctagattttggtaagtacaataacttatcctattgatggaagcatgtttgtgaggttctcaattgccttatgccgtaaacggtttggtggtggcttgatggcggtgataaggtggcttggtggtgcaaatatgggtgtcggagggatggaatacggccacaaatggcagtgatgaatcgctgatgataggggttacaatgcagggcaagggttttcagaccctctttgcttgctttctgtaacatctcaaaaatttaaatatgttagttagaaataaaaaagagaaattacaaaaatgcttaaagaagaatgatcatattaccgttttccttaatataagaattaccatattacccttgaaatagaaattacaaaaatgcccctagaataagtgacaaattaccaaaatacccttggatattttgaagtgaaaattacaataatactcctgaagtgcatgaaaaattaccaaaatacccttagatgttttgctagagacttgaagaaattacagaaatacccctggaatgacaaattaccaaattgcccttagtaatagataaaaatcacaagaaaactaggagtacctagacttaccgaaaatttatgattagataagtcagaagataagtctctaaattttattacccaatataataaatgcaagtaaataaaacttacagtagaaatgaaaaaaattgcatgaatatctaaagctatcatgagctatagttttcagaccatgtgataatatgatgaggaaaattatcacatgagaaacacctatgatggtagtgtgatacaagaaggatatgatagaagctaatggattcaagtaacaagtttagaagtgcttagaatatatttagttataattagttaatttaagaaaagaaactaattctagttgtgtaggattttgggcaaaggcttaagattttaaatatatgtcacatacgtagctagtatatgaattggaagacacatgaagtatactagatataaattaaaagaaacaaaaacataagaccaagccagcttatacgtgagattttaagctatatgcaagtgaaatttcatgtgttaaaaaagtgcatgccttgggaattgtgcaccagatgataatttttcaaccaagtctataactaatcagatttggcttcttgaagactccattccacgtgcatatgccagccaagcccaaatggaatcttgctttatttgaagataacatgacattaaatgaataaggacaaagcttttagatatttaccttaggtaatgactatttagttaatttaggactaaactaactacaaaccaagttaaatcctaactaattcacttaatataaatagcttatggcaccacaaaaattgcacgtataagctagtttccaaagcacacaaccaattgcattctcccttgtaccttgatatcattttctcacttctttcttcacttccaaccgtagtctatctcttctattacctccttcacctttccaaaacatcaaattctagacaagactttcattctttcaagacgttgaggtgcagccaaatacttagaggaattggaagcaaacttgtttgaggtaggtgaaagttaggttcatttatcatttgattcttgagattattcgtatggatgtaagctgaatatttgactgtttttaaaattttatatctccctctgtacctaaccaaattaggtgtttgaccactcattttaaatcttaggatgtcctctaggttgtcctaaaatatgagaccaaattgagcagtgaattatgcccagaatttatttaaacccaagttgtccaaaactgtgcatattcaaaatagtcactgccacccgttttaaaaaaaatatttctctctcatttcttaatcaaataagttgtatgatatatgtaattaaagatctagattttaactataacatataaaaaattcagctaaatctagattgtataatgcttgcagtcacaaaaaaactaagagatgtcagtgtagaattttgagcttgctggcagccttggagtattgttattaaaatgctatagctagagttttagaactccaattgaagaatgtgatatcttgttagaaagcttaggaagtctagtttaacatagtaaaatatgagaatttaatgatttttagattaatatagattataggaagaagctaatcatatgtggtgagaaatcttgttgttatgatgttattaaaaagtgtttttgtatgatgatgaaatcttgatgttttgtggaataattgcatgacatgagttgtgtagctttgcatgtcattgtgcatgtcatatgcattaagaaagataaaaagataagacctgaagggtgatacagttaagctgagcatgaccctgatggtgtccaaagggtgatacgattaagccgagcgctaccctaagggaaagactaaagaagataatacttgaagggtgatacagttaagttgagcacgatcctataggaccccaaagggtgatatagttgagctaagcatgaccctgcgggaggaacctaaatctagtaatgagctcattgtctagtttagagtattaaagaaaagattaataaagataagctatgcattgtcatgattataaatgatgcttgcattaatgatgaagtatgacattatttttaagtatttgtgaataaaatgaatctactttggtttatatgtttatgaaattaaaatcaactataattgtttacatgttttcttaataaatcaaagtagcgagtataataaccctgagtcctggcgtggacggcgtgagaaatctgtgcggatggcactggttttctgcagaattcttctgcagaaaacagctgcagaagtgtggtgctgggagcgccagtgtggcgtgatcagcgtcgtgctctctggtttgtggcgtgagtagcgccaggttggcgcgtgaggcgccataggttctggaggttgactcctagggcgccaggttggcgtgggtggcaccgtataacccagaggacctgatcttctttgcagcgggtgctgttggtgctacagtggcgcggtgggcgccataatttctggaggttggcgctgttggcgcgggtttggcgcgaagagcgccatggtttctggaagctggcgcgattagcgccagagtggcgtgatcggcgcggtagctctgacaggaccactataaaaagggcaaatcgcgattttgaagaggaaaagttgcttcttcttcctgtgagtgcccttcctccattgttgaagctccaagctccattccttcaccatagttcaccaaaacaagttccttgaacaccctttttgttggaaaacacttggtgagcttgaatcgttcctcttcttcccttagaaaccccacatttgagaatccctttctcaagggaaatacgtagaactcgagttcgacgaggaacgacggcgattcgtggatactcgtgctttggggagtcgtccttgggccttccttatcgtcattgaggtaagaaactcgagattcaccgcttgatttgtgagttggggttttggatgaatagtgacccacttgtgatagagctagtattagccttgggtcctttagaaacatgtgtttagaatgttgtgaggatcaaggattagctctcatatgttagtttggtgaactttgagttgtggctctatgatatgcatgtatagttgatatggtgagttgcttggctatgttgtgacatgcaagagccttagtatatggtatggatgtgcttgagaggccatatgaacggtgtctcatgggtgatatgaaccgttcaagccttatgtgaacccttgagcctttgggctgttgagagctttaagctcattgtgtttggcttgtgttgagtttgaggtaactctaatgccatgtttgagatgagagagaccgttgagggtctatgagatggcttatgagcaatgagccttgatgaaccttaagttagaggacttagaggttttggaaaaatatgaggtacctttcgttgagacggttgagaaccgtgctatatgctcgtgcttgtttgattccttgatgttgatatgagcttgtatgccttgtttagggcgtgacaccgagggtgtcagtggcgtgggccacagaacaagggaagaactacagagctcggctttgccaggtaagttcttggtccctggggatgtttcccgcttgtttgtgccccaccacactccgagggagtgatggctgcattcatgatgcatgcattgtggttgttgcatcctcataatgatatgtatgctgcatctatgcttgaaaaatgtatgatgcctgtgattagatcttctggccagttagatagatatggacctccctaggagatgggtttcctcctagtttggtttgctcatggttgatgagatcccaggggtcggtgatccctcaagaccaagagataggagatgggacattccttctattctcggaggtaccatatacgtgcgtccatgcgtaaggggtagctcccgatgggacggcacgtgtgtgagttccagtctcacactgaggttggcattgatgagatccgccgtacatagagtaagatgacttgcttgtattattatgagggtcgggaggccagattgtttgtgatacctggatgacgtgtgtcatggagagtgagccagggtggaggagatgcctccaaggaccttgaacttactgagatgtttatctcaccccgtgtggggcttatgtggtttcaagtgacgcttttggcagagaggagcggtctcaggcgggaggccccagtagagacagcgtatgcttggctgtgaggcagcttgaggaaagcttggtggctcagcttttgatgatgttttgtacccctgtagagggaagacgtgtgtgtgtacacatgtattatgttgtatttgtatagaccttgtatgccttcgtgtgaggaaggatttgtgagatcagaagcatgtggatgcttattcttttgtatagacactttgaatgtcagatattgtatatgtacataaccagcttatgttatgtattgagatttcctcctgtttatctgttgagataatttgagtatatctgcctatgattatgtttgtgtgatctggagcagcaggggcttgttatgctttgtgatgagatattttatgagttccatacataatgtaatcaagaaatatggttttgtttatgcttccgcaaagtttttttttattaaagtgattaagcgctaatctgataataatcataatgttaatacaccgggtgcacacggggtgttacagcaagaatgatgacgatgacactatttgataagtcatttttcacctactggaattttttttgaattctcactattttagtatgttcccgtgtcatttcagacaggtaaatcgaaagaagcagctacaaagtgaggacaagttggaagatttcttttaatgttgcagacttgtagtattttgttatatgctttgtagtatatggacattaatattattgtaggaaatattatttacaagttattaataagtttgtaaattattaaggagaccaacgtgtctcaacaggctctatataagcataattttcataacagttaaatttctaatattgagataagtttgtctcaatcgattttggttaaaaaaaatttacgttagaaaagttaacatcttctagttacatattatgacctaggcataatatagtaattggaagggtgttaagtttctataatgtcttggtgagaaagagagagagtatgcaggaaaggataaagccagagaaaagaaaaagtcaaaggaagatggagatagagggtacttcttttggtgacagtggtcagtgaagagtggagggacaaatttggaaattcaaaaaaaaggaaaaggaaaagaaaaaaattagaaaagaaaaaaaatcataacgattgatttataaaattaacaaatccaacgggcaataatactttgtcactgtgggagacctattcatgtctcccaagctagtctacgtcttgaatcaatatcaatctcaaattgcaacataactattatttctaccagaatcaaaaggaagaaaaaaaaaagcatcaataaccagaaacgcaaaatcccccaatttccattgaagcaaagagtacgttgttgttgcagcgttttcgaatcgtaatagtttgtttggatgaggcaatttaaaattctaaaaaatttaaaattcaaagaatttcaaatgcttcaattgaaattctttcattttcataattttgtgtttggataaagaaattaaatttcttcaattgttgccagatactgacgaatcctctgccacgaaaacttgggctgccttacatgtgagttgcagaatggaacgataatggagcaaagagtggtgtggtgcggtgcaagcgtctatagaagaagatgatttcaatttctcacgttttagaaggaaattaaaatttcacattgttagttctttaaaattttgttttaaaattccaaaaatttaaattcttcatgtatgtttatccaaacaatgaattttagattaaagatcgaattttaaattctatgataaattactttcctcatttaaaattctctatcaaacacattctgaatgaaatccccaaacgcaaaaaaattggtttgttgcttgatgactgcgaagagttgtctttgtagtgactagaggttgctatagaggtagtcctagtcgaaggctgtgtccattgacgagtttgaggtagaggtggtgaagatagaggcaaaaggaaggcttccccgagagagccatcattggacttttgggtttcttttgttttcgttgccatgcacgctggtgactacttcatgcgcttgttgccgtcagcatgcatggagcactcagatgtcactaaacagtggaattcccctttctccgctaactccacaccgtggtctccgccactaacaccaccactttcaccatgtacacaactttatcctacatgctcgaccccaaattcgtcattagttccaccaacgatgaccctcaccgccttcacctcgttcttattgcccgtcactatctctttttgagagtgtgtgatagaactgagtgtgtgcaaaaccctactctaacctaagtaagggggagggacaaattaatttatcaaattgttataatttatttatttgttcttttattaaattaagtaatagaggttaaacactgttaactcaagggttaaaagtcaagggtaaaaagtaatgtaaaaaaatacatggatatcaagagtaataacaccaaacctcaagaggattactgtaatttattctaagtaccttaaaagttacatagcacatgttttatatttatatactatgtgtaaagaaaagcttaaatttttttcagcataacaaaattctaatttaaaaataaccgttaatttcatattttatgaaaggaaacttgatactttatcaaatgttggatcgaaatttataatttcatagcagttattgatttggctattgtaaccttttttgtaaaaaattattttattcaacggatttttttttataaaaaaaagtattaaacattttagaacaaataaattttttactcctgttgcttttattttccctcccgttgattttataatcaattttaaatatggattatacaattatatatagacagatacaataatttttatttaatttctatactgaaatattaaatttttaaaaattatataacaaataaaatgctattacttaatattatttatcaccatgggatcaaaattttaatttccgaacggctgttgatttgattgttgtagaattttttgtcaaaaaatatataagcattatttaaccattagatttttttaaattatttttacaacaatcatttattttactttattcaatgcaaatccattgattttattcaaccgaaatttaatgtatgcgcttacaagctgactatgtaacatccttctatttactatattatgcctagataataatacgtaactagaaaatgttaatttttctaatgtaaaatttttaaccaaaattgattaagaaaaacttatctcaatattagaaaattacgcttatattgagcctgtagagattttttgatctctttaataaattacaacttagtaataacttgtaaataatattccctacaataatagtaatgtacatatattacaaaacatataacaaaatactacaagtccacaacattaaaagaactcttccaacttgtcctcactctataactccgcctttcgatttacctgtctggaatgacacgggaatatactaaaacagtgagaattccaaagaattctcagtaggtgaaaatttgcttatcatatagtgtcatcgtcatcattccagctacttcggtttattaagaaaaacatgtgaacaattatagttgatttttaatttcataaacatataacccaaagtagattcattttattcacaaacacttaaaaataagctcatacttcatcattaatgcaaacatcattttcaatcatgtcaatgcatagcttacctatgttatttttcctctttaataccctaaattagacaatgagctcattactagacttaggttgctctcgcagggtcgtgctcggcttaaccgtatcacccgttgggtaccatcagggtcgtgctcagcttaactgtatcacccttcaggtattatctttctttagtctttccctcagggtcgtactcggcttaaccgtatcaccctttgggcaccatcagggtcgtgctcggcttaaccgtatcacccttcaggtcttatctttttatcttccttaatgcacatgacatgctcaatgacatgcaaagttacataactcatgtcatacaattatgccacaaaacatcaagatttcatcatcacaaagaaaatcaaaataaagaacatcataacaacaagatttcttactacatatgatttggttcctcctatagtctatactcatctaacagtcattaaattcccatcttttagtatgttaaaatagacttcctaagatttctaaaaaggtatcacatgcctcacttggagttataaaaatctagatataatattttacaaatagaacttcaaatctaccaatagtctcaaaattccacactaacatctcctagagttttcacgatttcaatcagtaaaaaatctagttttagctgaaatttttatatgttatagttgacatttatatctttaattctatatatcatacacctaatttgaataagaaatgagagagaaatgaatttttcaaaacaaatggtagaagctgtttgggtgtgaacagtttcggacagcttgagctaaaataatttctgggcatgattaactacttagtttgctcccatattttaggaaaacattgaggacacactaagatttaaaatgagtggtcaaacatcgcgtttggttaagtatagagggagatatggaaatttcaaaacagtccaaaattcaacttacagccatacgaattatctcaagaatcaaatgataaatgaaactaactttcacctacctcaaacaagtttgcttccaattcctccaactatttggctgcaccttaaggtcttgaaagaatgaaaggctggtctaatatttgatgctttggaaaggaaaggatgaaaatgaaatgaaagagatgagagagattcacgtgaaggtgtcgtaggatgaagtcttgagaatgacttccacttaaggcctcccttctcccctttatatagtagttggaaaataatataatatttacaaaaatctcctaagtcatgatgcttccattacaggtgtccctacacttgtcatgacctttacaagtgtctcaccacttgtcatgatcttgaagcttcttccttctttcttccaagtgttcctccacttggcaaatcatgaagcttctccatggttctccatctttcatgtgaatactagaggaagggagagaaatcttgcttcatttcatgttactttatgtacacatgtcatttttgatgatgaagaagaatccaattcccttatggcttcacacatggcattttctagtatgaattcaagtttgatttgaattcttctacccaaagataatattgaataatagaattctaaagttttccaaaaatcgacttcaattacagtataaattgtccacaagcagtctatatagagtgtcatacagactttacatacaagattgttcttatcttaattttgattgatccatactacttttgaccatcaaaattactaaaccaatttattaaataagtctattcatcctataattaagagaaaattcctcagatcctacttatcatttttccatatttttctgatgcttgaattcttctgaataaagtttcaaagttattaccttataaaattcataaaaattctattctaaggttttctgtcacaaaagtattttggaaattttgtcatcctagggtactttataatttcatcaaattttcacaaaatatctaagggtgtcttggtagtttgtcactcactctaggggtattattgtaacttccacttcaaaatatctaatcaaaatatccaagggcattttgataatttgtcacttacttcagaggcatttttataattttcatctcaagggtaataagataattctcatatcaaggaaaagagtaatatgatcattctcctttaatcatttttttttttgtaattgctctttttatctttaactaacatatttaaatttttgggatgttatagactacatcccttttccgtttgtctctagtgttattgtaaagaatctttgtcttgttttccacatttttataaaatatattaaacattttaaaacaaatagacttttttattcccgttgattttatagttaattttaaaaatgaaatataaaaatatatgtagacatatataataatattatttaatttctatactgaaatattaatattaaaaaaaattaatattttttatatgatataataaataaatgttattacttaatattatcattgtttattattaatagtaattaaaggataattcatcaaatcatgtccaagtttttaaaaatatttaaaattaacataacgtttctaagtttttctcccattaaatgatataaaaccaatttaatatgaaaaagaaaaaaaactgaatgtttactccgctattttctatttagtgacttcatggtaattactttcagtaacatttttttatgccacacgtttataattttagggccacatgaacattaaaaatataatatgaagaaaatgttaatcataaaattttgttttttcttgcattctgtaaactgtttctattagtttctttcacacatactaataatgcctacttccaataatgatatgggaacaatgagtactctcattagtgatcaagattaaaaaaaaataatgattacttcgagttaaaaagttgatacttccaaaaattgctatggaataagtaaaaattttataatgttcacaataattttttttttatgacgactgttccatttaaaatccatttgaagagtcattggacaggttttataagatgcggaattgttggatatttctttctaccacctttctatctttatacaattggagcacatttgaagttttcagtcaattttaggtgagcaaaagcgatattcttctgtatggtaaacattgtttctacattatgttgttcttaaatactacttttctcctattttcctataaattattattgttttcttctatgataacataacatacaatgattttttttaataaaaaataattttttatttccaatcatcatgtgagtcttcaaagttctcccttatcaattatgctataatttgcattatgaaatttactaggattgttgaagcctaaatcgtgtttagggtgatattggagatcgatcgagacacgatatccatgttatttctctcataaattctacgaacatggttttttcaatatcaattgcctcctcagtcctcatatgctacaatttgagaattttattttatttctataataacataggttgaaaatgagtataatattatttttaaaagaaaaatgacttcttttttgttgtttgcatatatgatttgagtctttagaataagtatacgtagtttcaatcttcattccctcaaggtgtgcaaaggtcctattttgaactttatatttttctaaaaaatgttcaaattttaattatattttaagatcaactacttaattctctatatgctaccatttgagtattttatttttgtattagttgttcactgaaactaatcaaataaattgacctaatcatattaaacttcaacattttcatatatattaaatttttaaccaaatatccaaataagataaaaaaataatggtgaactataagacaatttgattttttttattcttataaatttagacttgaaagtataataaatactcataaagtatcataaatataaaacaattttaattattactattaaatatttttgccttatgaattcactcagcgtgagaaaaaaattactacaaaaaagaatgagaaaataaatagtaacataaaaactagaatgtacacgtataaataataattcttatacataaataactttaaaaagtaacaattaatctaataataattgaaaacaatgtgaacacacacaataaccaagaagaagtgaatttgttaaaacaaaatctttaaaatttctttaaaacaagcaacgaattttggatctttatcacaattaaccaagaatgctttaaccaatcaaatcactcagtccaaaaaaacaattacaaaaacttaacttgttgagtaataaagaattcaccaaaaatcatagattaagatgataaaaagagattaaagaaagtaatcaacacaaagagctatactgtccacctctcaaccagagacactgcattcattttcttccaaccaaaccttggctacagttatactattaacaaaatctgttctttacaagtttacaaaagatcactctttatcagccttagataaagaactgaaatctaaaatcctattagacttctaatgatcaagacatagagaactcttttctattctttcctctagagaaccctactctagaaaagctttaaagaacctctttgtaatagttactgttatggtaatttcccttggcccaaaataaaaggctcatttatcttattaattcaaatacctaatatcttaaccatcaaaggataagaagatatgacaaatattataactgccacttatcagttattcagataagcgaaggtagtggagataacaacactatagccactaaacccactatcagttaatctccatatacagataatggatgaggctcactactcaactaactcaggtcagtattctcaaagctataaataaggacgtcttccatggagaaaggtgttgcgcgatttatgcgaatatgtttacggcaagtgcaccgatcgttaacaagtaataaagtaggtaagtgagttatcgtctccacagggattggggtaatttttacaataatattaattctaaatgattggaatttaaaaacagaaaaataaagaacaaagaagtaattgttgagttgtggttggtgtttgaataaaaacagaaattaaagtaagtaaaaagataaagaagttaccaatggaagaaacaattgtggtcaggcacaatcccttttgtccctacctccttcacttgattggtttattatcttaagtcacacacatgataaatctttcctaaattcgtaaatcctagaactactagagtcataaccagcgatttaacccgttagttcgatcgagaaacctaaacccttagtgaatctgtcaaactaagtattcaaagaatatatctcatgtgatcttgttaagattattcggaaaataagtcttttctaagttagttaattcctaatgtcttagtgaatcaaccctttaacccaattcaaaaactcaatttcttggtgaattctattaagttaagcatgaaaaagaacatattataaaatccgtagccacgcatccctatgtctaggcgaagaacgactattattctaaacatgtcagaaattagaaccccaacgtgtccattgcgaatcctaaccctcaatacttaaatagaatggccaattccaaataagagtaaaacattgaatagcacagagtagaataaaataatcaaaacagcattaaaaccaataccaattcaagttacagacgagtaacatcagttcatggccttcccacaatacaagtttagcctgccatagacttcaagaaaccaaagctatcaaatagaacattcttgagtgaccttgccttgattcttgacctccaatggtgagaatatgagaaagagagagtggaatgaatgatagaaggtgatgtgtcagtgtctgtctgtcttgaaccccccccagaggcctttatttaaagatagatctaattaaggtaacaaggcctattttctgttccaaatctaaatcaaatcttcttaattaaggaaactaaatatatttataaaatcacttaattaaggcaactaatcctaatataatatcaaatctgaaaatatataatttaaataaggaaacagcatcaacctcacgcgacccgcgcgcgattccacgcgagtcgcgtggactggccgaaaagatggcgcttgtcgcgtgaaatgtgaagtgcctcgcgtggagtaacagaagagaattccttatttctttgagtcttcacgcgacccgcgtgatactccaagtatgtcgcgtggaatagcagcgttgaaatgcttaaatcttgaagttcccacgcgacccacttgagtaacggcgctacccgcgtgatcttctctggtcttccaagtggcccgcgtggatgttggcgcgactcgcgtgatactccagaatttgttttcttctttctttggcctttattctcctcttttgtcctgaaaatgcataattggtattggaatgagataaaatagaatattattaataaactaactaaaactaaactaattcctatttatttaatcaaaatataagctaaaactattctaaaaataagatgtgtttgcaacacatcaaaaggtacacaaagacacacattctaactccctctctttcaattacacagagcacataccccacgtcaattgatgtatctctgtgatcatctgcttcaaggtatcattctccattgatatccttaaagttgcagagttagagtgatcaaacagcaaccacacagtacctttgtgctgtacatttgtgttctgggaaacatacagaacattggcgccgtctgtggggacgataaacttcgactcccacgcttatatacagaaaaaggagaggagaaagagaacatctaaattcgcatgttaagaagagcaaaaactatcatcctttaatcttctcgatctccttgtttaactgttagattttgctgaatcttttacaacaagttcgcgactcatcaatcttcacatctaacggtgagtttcttgaatcgaggcttgaagcatcaccagaaaattccaaaccgaaatcgttcagaatccgttttctgaagcaggcagcggtgttgcgagggacatttctctcacactaaccgttggatcgcgttaaaactttgaggaaagattactcaaatatgtttctacattatgaccgttcggataattcattgaagcgtcttcaagagggaaagtttcaactgcaaacaaaggttatcagaatttctgctctcttttatctcgtttcaggcagtgatattgagaaagaggtatctcttttatcaaccgttggattatcctcaaattcggttagtgtgttcctctcttgcagtgaatcaatttgaccgttgggatttgttaatttttatttctagtggtagaaattaatttcgtacataatccaattttgtatgcctaccttttgtgatgttttggtacaatttttgttgaaattgtttgctgattgtaatggttgtcggaacccttgcgaaatctaatttgattgatagtgaagaatttggatggatttcgagagaggtcccataatttttacttatcacattaagaaggcaacctcatcaatatagaatgtgagattcaccaacaccaacatggaagccaggttggcatatgcccaatatcactttatgagggtggatcttgtctcaggaacggcaacacagattagattaagcaaaagctaagtcttctccctcttttctaatatgaagcgtcataaataattctttatagtatttttataataatgtatgtgtagaatattattatttttacatgtcaaataatgaagagaaattatcgtaacggccccctgggataaaaatggttaagttgcaggaattgaatcttgagggtaaagcccaagagagggttaaaaactcaagaattgaatcttgagggtaaaacccaatagagggttaaaaactcaagaatcttgagggtaaagctcaagagagggttaaaaactcaagaattgattgcttgagggtaaagcccaagagagggttaaaaactcaataattgaatcttgagggtaaaacccaagaaagggttaaaaactcaagaattgaatatcctcattaacctcgattcagcgatagttgctagcacagcttgataggtcagagtgctaaccaaccaagctgggggacatctgttatggtaatttcccttggcccaaaataaaaggctcatttatcttattaattcaaatacctaatatcttaaccatcaaaggataagaagatatgacaaatattataactgccacttatcagttattcagataagcgaaggtagtggagataacaacactatagccactaaacccactatcagttaatctccatatacagataatggatgagactcactactcaactaactcaggtcagtattctcaaagctataaataaggacgtcttccatggagaaaggtacacaaagacacacattctaactccctctctttcaattacacagagcacataccccacgtcagttgatgtatctctgtgatcatctgcttcaaggtatcattctccattgatatccttaaagttgcagagttagagtgatcaaacagcaaccacacagtacctttgtgctgtacatttgtgttctgggaaacatacagaacagttacaaacaaccaaaaatacaaaaaaataatttacaaagaaagctaatggagagaggcaacttgatgatcctttctctcttttagaaggcttatgaaaattttgagaatttcgtaaagtgatgttcttatcaaatcaaaagacctaacaactatttataacaaattgttgtaactaaatgtaatcgattaaatcatctaaataatcgattaaaacttcatttgtaatcgattgaaaacaaatttaatcgattaaaatgttcttcaattttctggaaaggttatatgaacaaaataatcgattatttcgacctgtaatcgattactatagagattcattgttccataaataaactaagtaatcgattactaataaatggtaatcgattaacacagtcaaatcatgttctgcgtttatactgaataatcgattacttaatgctgataatcgattattttgttcttcaaagctcaggtaataaattaccaatatgtggtaatcgattaacacactccaaaatggatttttcaaaaacttgaaaccatgaaaccgtatttgctgcaatcatgaaatcttaaacctttttcgcaaacaatgtgtttttgtcaaattatgaatgcaagtaaatgaatgatgtttatgcaatccaatggatcatatgatgattctttcctacaccaagcgattacaaatgtctttaattgaatgacatgtacaaagctaaaaaactcatccatctttagcatatatcttgatccaccttcatgcttcccctgtatctccccttatgactttgataatgccaaacttcaattgaacatacttagccttcatgtgcttttaagggatgaatgcttagagctttatacttgatatctgaaatcaattcaactttttccaagaacaagtattaagcgtactttgcataaacaatgtatattcattttattgctccccctatcttaagtaatatgatattaaatttagataagagcaataaacaattcagagttaagaatacagagtaaatcagataaggatgtaattgtacttgcacatcatatatttattcatttttctccccatcaatatgttaatatgttcttatttttctccccttttggcttatcaaagtaaaaaataatcaagaaatatatgagataagcaaaggaagatataaacaccataaaagtgaattttatccattaatgataggtgcagaacaagatacataaaagtaaatactttgaaatagtcttcagccttaagtaatcaattaatacaacattgtaatcgattacttcagagatattttgattctgaatgcatttaagccacaagtaatcgattaattcgtcatagtaatcaattactccagaaagattttcattttgaaaagcactgaaagtaccaagtaatcgattaattcgcacagtaatcgattactccagagaagttttgtctttaagattatctctaaacctcaaatagtcgattatgattcatagtaatcgattaaaacaaacaattatgcagattgaatagtgcttttcaacaggatttcaaattttaagcatatgtgatgaatgaccaatataaatggtatagtatgtagtcaggcacattgcaagcatgctagcatatattagatttatgatatgctactagcatataatagttttaggctaaaataatcaataattcaatcataatttatcaataaaggttaggataagtttaagtttcatcaattctcggtccattacttattttatgcatattttgtttcataggaatcaagaaaagaaggaaagaaacagaaccaagaaagatttgtcacaaaaatagaacagtagaggagcttaattaccctaaatataaatatggacgtgcagaaaacaaaggggaattttggacagaaaataacacacagaaacacaaggtgaaacacaaagggaagattagagtcagtacgagaagatcgaaggaagacagagcaacttataattcttttactttctttgtaattctctcctagatacatgctagttttgcacttaaggttagttatgagcatgtctggctaacttctcttattgtagttagagccaaaaattgatgtgaactcctctgtattaaattgatattgagattaatgttatgattgttttattgtatcttgtgcttatattgctttcgcctcaatagaattgatcactttattagggttctaagggttagggtttacaatagggatgttggaactctgatttctgatagcggtagaataatagttgttacattgcctagggatagggataggcaactacagaataattgatgtattttcctaatgcttaacttaataaggaattactaagtcattaggatttcgagttggttaaagggttaaattactaagggattaggatttaactaaattatatcaaatacatcctctgagcaattataacaattgaaatcaatcaccaatttgcatataaaaggtaggaatcagaagtagaggtgctctgaccacaattatttctcactattgtgtaacatttaattaaaacttgtttttgaattctcgttaattttctattcagttatttaattttcataattctaaaatccaatcatattctttttagaacatattatttgtcttccaattttaagataataagttgcgataaaatttgtgcctcaatccctatagagacgatactctacttacttattattacttgaaacgaacggtgcactttcaatgtcgcaataatttatcaagaataactagaatgttcctaagatcatagaattaattttaagataagagtttgttagatataccaaccaatgaatgatcaatagactcaattaaacaactcccatttttgaatgtgatctttaagaaaatgaagtctgatctctatgtgcttgtgtccactccattggcctttgagtagatgattgactgatcaatttctatcaagtgattcaccttgttccttctcattttcctttattattatcttcataagtgacaaatccttcaacttttagagtcaaatttgtaagtatgaacatgtcacctatcaagtgtctagatcatcttctgtctaagtaccataatgatgattttgctctaagacacacctacaaaaatcaaactaagtgccaaagaaaggtacccacttaatggttagttattttgttctttttctttggaaccaaaatgtaatctccattaggcacatgaaaccttgtagcataacacttatgagatgtatgacctttcttcatgcagtaattgcaagttatagattttgatgctatttcaaaatgagtcaattgattatgctttgtttttgaaaaacatctttgattcttctgtttagatggtacaaactttgtatttccaaaaaattttgctccatgtttgtaacccaaaccaaaagtatctctaacatatttttgtacacttagcatttgatctaaagtgcattttcctttataaagctttttcaaaatatcaaccaagtaagaattttattaaagtaattgcatatatttttcagattgactctttttgaaatcatccaattccttttctaaagctttgcaattatctacatttgtagaagaagaagcacatatacatccattggctttgtagcttgaaagaagtttctcattctcttctttcagcttacaaagttcaacttgttgttcaacaagtttcgtgatatgccatttaagattacctttcagcctattgttggattttgcaagcttttgggcctcttcatacatatcatggaaagcataaaaaaaattgatcaagttcagagtttacttttgattcagcacttgagagttcttcatctttattaattatggaggtgaagcatacaatagccttttcattctcacgtgatgaatcagatgttgttgaggcattgtcttcccattcattgcaagttttctttgatttctttccacctagctgcatcttcaaaaatataggacattcaaattcaaaatggtcaggcttaccacattcgaagcaggagaagtttgcattgctgttgttgtcatttctcttgttggactttgcgaacttcttgttctttttgttcttcaagaacttgctgaatcttttgactattaggttcaagtgttcatcattttcatctttatttgagtattcttctttttccacattagaagttgaagctttcaaagctatactcttttgcattttatctgcattttcatcatgtgttaattgagacaattctaattcatactcaagaaacttaccaaataatgcagccatggacatcttggatagattttttgattctttgattgttgtcacctttggttcctatggacatcttggatagatcttttgattccttgattgttgtcatggtcttgttagacacttcaagattttgatgtttaactctttagcatcaaatatcttcccaagaccatgaagatggttcacaatgtgagtgaatcttgtttggagccgagatattttttttgtggtgttcatcttgaacatttcatactcatgaatcaagacatgattcctgtaagacctcaaactttaaaccctgtgattaaggctataatcatgttttaattatccaaaagggtgcacttagcagaaaaccctgtaagggttgcgacgctgttggcgccggagcactagaatgtggcgccaggagcgctaggttcacgctgagggcgccacggtctctgggaattggcgccaggagcgccagggtcgcgctggaagcgtggagtctctggaggtttgcgctttgagcaccagatgtggcgcggatggcgccagagtttctgaaatgtggcgccaggggcgccagaggttctggaatgtggcgccaagggcgccaagtttcccagctggcgccagagtttctgaaatgtggcgccaggggcgccaagtttcccagttggcacggatggcgccagagtttctggaggccggcactgggggcgccaggatggcggcaagagcgccacaggtcgggcaggaccactatttaaagcccaaaacgcgaaaattgaaggggaaaatgcttcttcttcttccttctgccctagactccattgttgaccatcccaagcttccttgagccatatatcttgaccaaaacacttccttatggcttattcttgtgagagaaacaccttggaagcttgaatcactcatcctttctcttcaaaaaccccttttgagtgaattttggaatccccaaagaaaagctcagagaacttgagagtggctgagacccattgcgtggaaaggacaccagagctcgaggaggtggtcctagggtattccttaacgccgttgaggtaagaaactcaagtttctccatttgattttaagattgggggtttgcatgaatagtaacccatatgagatggggttggaattagccccgggtcttgtagagacttatgttccggggttgttgtgatgatgttagagccttcagaaatcattattgatgaagtttgattttggttctgagttatgcatgtatagagaaaggggctgattatatggttgctatgaaccttagagctgttgacatgttgttcatgatgtcgtgtagaggttgttatgagctgaattgagttataatgtaagcttggagtggataaggctaaaagtgaaatatgtgctttgtcttagcctgagcagagtcttaggagagactctagagccttagttaggctgagaggggtcctagtgaggatctgagtatcacttatgaagtaattagtcacgtatattgtggaaaggatagtagtttcctttcatgtgaacgacttaggaccattattaatacgctatgtgtttgcttatgtaggacgtgagcctgatatctctggtggtagtagccacgataccggggaagccggtgttttgcttagagcaggtaagctctttgctcttgtttgtatgtccttgctatgtttcaccatgctccaaacggaggaatgatttggatgtgaaccattgtatgtaagtggaacatgaatgtgtatatgattgactattgtattgtatgttgtaccctgtgatgatggggatgttgtgtattgattggaaatgttggaatgaaatatggaattgtagtatgagcttgatttgatgattatgagctgttttagcttgtgaagggcatggatgattaatagattgattatagattctgaaaatgaatgaaatcctatggtagtaggatagatgacttgagatgtagtaagtcctgatgtgagatgttcctgttacatagatgtagcctcctacgggagatgttcctatgtacgcagatgtagcctcctcaggcaattgtgtggagatagaatatgagatgttcctgttatatagatgtagcctcctgcttggagatgttcctatatatacagatgtagcctcatatagattgatgggatcctggcaagagatgttcctagtatgtagatgtagcctcctacttggagatgttcctacatatctagatgtagcctctgctggatagtgatggagacttgccatgagatgttcctaggatatagatgtagcctcctccttggagatgttcctatatgcctagatgtagcctctacgggtagttgtttatgttatgaacggttgtggccgtgattggatcacctaagtgttgacaggtgaatgtgatttgagaccttgattccttgatgattgtgagattgatgtgctgatgtttgaatccatgtgtgatgggttggatatattatttcatgtatatgtttgaagtgaaccaggggaaggaaataacttcaagggccttgagtttactgagatttatatctcaccccgtatgtggggcttatgttttgcaggtgattccttaggaggagtagatagatcccaaagcaagaagcctatgcagggatagctttgatttgcacaccttaggctagatgataagagcatgtggctctaatattttgtatctgcctttggttttgttttctacctgaggggtgatgtatatgtacagttttgtataagacacagatgttatgtatattcaccatattttgatgtataaagactatgatagtgacatttgatgatgtcattctctttcttatgcttccgaactgcttaactctgatgatttctgttattgatagtaattaaggctgggtaatgaccttggttgtagctggggcgttacacttccttgatcttctgacttcatcagttccttcatgagtgacttctaacatctcccacatctccttttcacttttacgcttagcagttctaaagaattcatcagaagaaaatgtagaagtaatcatgttcttagctttaaaatcatattgaacaactcttttttctgcaccagttatctcatctcattctttgggaatcatattattaccaacaattttcataggaaccaaataacatttttctattgcattccatgcatcaaggtcatttgattgaatgaatatctgcattttgtttttccaaaagctgaaaagctccccttcaaacattggaggatgaataagggagacaccctctttgaaggtaatctgtgtggtattcattttctttaaaaaagatagtgatcttgaataacactcaagaaccagttcttaatgccaattgaaaataatatgaacacacacaataaccaagaagggggtgtgaattggttaaaatagtgtctttaaaatttctttaaaacaagcagcggattttggatctttatcacaattaaccaataatgcttcaatcaatcaaatcacttagcccaagaaaacaattacaaaaacttaacttgttgagtaataaagaagagattaaaaaagtaatcaacacaaagagctatactggttcacctctcaacaagagaagttacatctagtttcttccaaccaaacattggctagagttccactattaataaaatatgttctttacaagcttacaaaagattaccctttttcaaccctagataaagaactgaaatctaaaaccctattagacttctaatgatcaagacatagagaacccttctctactcttccctctagggaaccctactctagaaaagctttaaaaaacctctttgtaatagttacaagcaaccaaaaatacaaaaatggagagagacaacatgatgatccaatgattatgaataaatatgatttaccaatcagagttgaaaatgaaaaacaatttcagaacttcctctccaaaagcttctttgaaatcttgcctaagaaatctttcaatacaccatgaatatttgaatatgtgggacaagaactttagaactcagaatatcctttctttctttcagaaggcctatgaaaattttgagaattttgtaaagtgatgttcttatcaaatcaaaagacctaacaactatttataacaaactgttgtaactgaatgtaatcgattaaatcgcctaagtaatcgattaaaaattcatttgtaattgattgaaaacctatttaatcgattaaaatgttcttcaattttctggaaaggttatatgaacaaagtagtcaattattttgacctgtaatcgattactacagagattcattgtttcataaataaactaagtaatcgattactgataaatggtaatagattaacacagtcaagtcatgttctgagtttatactgagtaatcgattgcttaatactggtaatcgattattttgttcttcaaagctcaggtaataaattatcaatatgtggtaatcgattaacatagtccaaaatggtttttccaaaaacttgaaaccatgaaactttgtctttgctgcaatcatgaaatcttaaattttttcacaaacaatgtgcttttgtaaaatcatgaatgcaagtaaatgaatgatatttatgcaatgtaatggatcataggatgattctttcctacaccaagcaattacaaatgtctttaattgaatggtatgtacaaagctaaaaaactcatccatcttcaacatatatcttgatccaccttcatgttccccttatatctaacaataataataataacttatgccatgatgagattaaccaacaccaaatttcaacgatataattataattattatctttgaaaggataaaaaatcatacaatttcaacaaatttaaaataagttttaactttactacaaatacatttaaattgattaattataaacacaaaaaataattagatgataaataatatccataatataaaaagaacatgcaaacataatattcatatttattcgatctacttttgtatttaacatactactataaattataaattaaatttttttatgtacatattaaaaatttaaataaaatattgaaatatatattttaaacaaattcatgcaacgtatgagtttaaaatagactatcatgattattttaaatggtaattttatttttaaatttaaaaaagatataaaaaaagagattattgtgagttaggtgacatatgcaccacaacgagaattgtctatatacaactaacaacgttgacataagtagtattagtttgtatctcttaaccaagttatgtagggttcaaatcttgatcttgagtatgtagtagacaatgttgggaggagagtactcattttatttgcgctcatagttcccaatagagattatacttccagtggtgcatatttcattctaataccatggtaagaataaaaaaagctataagcaactaaatgaaataattaactataaataaaaatatatatttaccatgcactacttgaactacatggccttgtttttaataaatttacttggtttataaaattataatagttactcttgtgtacctcaaactcggacctttgtaacttggcatctatttttcattcgattaaaatatttttattgaaataaagtttaataaaactaattgatttaaatcggtttttccaatagttttaaaccaattattttatatagattacatgtatcctctacgtgagacaatcttgtttgagtcttgtaagattattatggaccgagtaataaactctttcttcgagtatttaacacaattacatacctcccagaacaaagctaacattgaaataagattcatataatcattaattttgatatgaaatattcatatattcctaaaaatatataattatatcaatttatcataatattaatacaaaatatgttttaatagaagacaaattaagaatttttttaagacttaagattataaatgtcaatcgagaagtactcaagaagcatatatatgatttcatattgttgaaaattaaaagaagaagaaatgttgtgtcataacaatagtcactatcttatactattttaaaaaatactttttaggttaaaaatgattttttatatcggttgtaaggtcgatatctatacatgtgatacatttacgatgattttaactgatcttaaaagttatttttatgattgattttcatacaatcaatttaaaaagcctaaatcgattttaaaatcacactttttagatcaattttgccttacaactaatgtaaaatgtttacatttcacaacaattattgtatcaaccgatgcaaaaaaggtttattttttagatcattctttgtacaacccaatataaaaaatttactttttatattaattataagacaaaattgatcttaaaaatatatttttattcatttttccctataaataattaccacaactacatacataccacaatacaaataaaaaagttgataacaaattataatatattttcttaacaataaaaacatcaaatacattctaaataaattataaccaaatattctaagcaacatatactactaatcgaaccttacgtagtataaacaacacaaataagttttacgatccattatttcattaagcagagacaagtcactttgttcatatacaccattagaaaataatgaccaccggaaaagtaagaagacattgttataataaaggaaagcaaaaatgaaatttaacgcagactaaatttttttttatttatgcaatagtccatgaagtcatgctataatataaaatttgtaactggaaaattatgatgtgtgcattgtacgtatatgtgaaattgggaaactatatagccacggttacactatatgtgccatggaaaacctgcaaatattaaataaccgtatctttgaatattgatacagaagaattgaagaaacattcatgaatcatgactaacactactgactaaactaaattgcggcttaataaagtaatcttttgacttttcaaacggaaaataggtgtagtgtgattaaactaactcacaaatcataagatggtttagcattgtggcaacttatctcacttaatgaaagaaataatggtagataattttatacagcacaactttcctaattccctcactgacaaaactgtaatactctattctctgtttcaactataaaggtaagataatttttatattttccaatgctctgaaaaataatccatgcatgacatctcaaaaacttaatttttttttttttaaaaaacttatggaaaagaaaaagaaattttgaaagaagcctatccttttccttcaaccaccatccaccagacccatgaattccaagccttattgccactagctactggcttgacatgattcagaataacattaaccttaatccagcagccatcttcatcttttgaattgtttccattttcttgtcaacaacttacatcacgggtacaaaccaaaaactagaaaattatgcataaatgtttgccaccctcaagcttatgaaacaaataaagattaatcaatacatgcacagttaaaacctgataaaatattagacaaaaggtcttaaaacatatgtatctgattcaaccagcctacctgaatcatggaatgaaggcactgcttatagtttgagtaaggtacagtgcatgaaattcttcagttgacctacacgtaaaacattgctttcataattcagttcagaaataaccaaacttcacaataaatatatactttcaaagaggcatgcaaacaatgaaaatcgacaagatctcactaaagtgacttactggagcactggttcattagattttgactcatgatccagtgttcttactcttctaacatataatgcacaaggcctgttagagcagtacttaatgccaagttttcttggcttggatcgatgaccacccaacgaaaacatctgagccttcagtaaatggagcccacacaacgtggccaatactcaaagatttgtcaattcctttgacttcttgtacgtctctgctgtgaaaatactaaacaagtaaagctgttgatgaagaatgaccaagagataaaacaagtaaaacttatcctttaggctcaccaaaaattatatttttattatttgaataaacaaaaaagatcacatatattaacaaaaaggtaacatatttcgacaaaaaaatctaatatataacttttttatttaaagtaatttttttcttaaaattcgttttacatctcattcatcgttagacctgatccaactgttaatgttgataactaaagtgcaggtgaccctcatgtatatgtttctccctagtcctcctcccagtccccttgacctttccagtgaattaggggatatggaaatccttctccattcgagaggagctccaaatctcaaagcaacaaggagcttcattctctggatttcgaatgactaaaagctttgagagccagaaagcgatggaacaatcatagacatgccagacatctctactggaaacggatcccacataaacttcactgaactgtcactttcttttaggatgttacaggacacgacggatgttatcctcttgtttgttagaagatctggttgcgaaacgacaagcattccatgcaacttcaagctcggtgttatggagaaaaaagtaaaacgatcgctttgcttagcattgcaatggaactatcacagatcaatgacataaacaaactcaatttggataaacttctcaataatacttgtagaagaaaatagtaagaatttaaaatgaaataagtttctactgtgaagtaaaattagattatgtataaattaatttgtagaagttttctcatttaacttcttcaaaagctgattttaacttatgtttgaaacttaatttattctacttttttatttttttcttcgtctagtataagtgcttattgattttttttttcaaacaggacaacaaaggagacttgcagctaaaatgtcatgccttgtcaatgttgggaatacttaataagtcttgaagtaagttagagaggtcaacatggtcatcctcggtttccatatgcatttccaaacctgaaacaaaatcaccagcaagtaatagtatagtgaagaacaagaatgaagagtgtagtgctattagttagtgaagtgtaaagggtggtaactggtaaacaacaaccatacaggggtggattgaggaaaaaaatatttttttaaaagatacagaaaataaaaatttgcatgggaagatgatcggatgcaaaaagtaagttttagtgaatgcattattaggatccagttagtatcgaagtgggtaatgagcagaaagaaactagtcatgtccctatcactctagtttggtacaagtccaaattttcactctagcttcgtatagtgtgataatatatctctataaaaatatccaagagcttcttgtacacagtgttttaaaaatcgactcagtgactgatccggtcagggtactaggttattgggtcagtggtcgaaccgatgagtcactaattgacccgcatgacccggtcaatggtcaaatcggtgggtcactgattgacccgcatgacctgattagtagtcgaaccagttgacccgcatgacaatgtcttaaaatatttataaaaaaatcacaaatgaatattattctataacataaagtcatagataattagataccaaaatgttaaaaaaacatcattatctaagttcaaacaaacaagtaccaaatattataaacataagctaaataaaataagttttaagttcaacatatgttcctaaacaaattcaacacttcaactgttttctacggccaaggggcataaactaagtcattgtcattttgaggaacttcttcttcattaacaaattcagaagaatctcccattgtaacttcatgatcaatattgctagctttcatttaaatttatgttttccatgggattctcttgttcttcatcaacatcatcatccaaatttaaaggacttatgtcaaaaaaattagagagaaagtactaattactaattagcatttagagataacaactatgaaacaaattaaaatataccaatatcatttgaaagtggttgaatggtcatatttacaaggtctttgcgtaatgcatccacctcctctacggttaagaacggtggtgaatcctccattacccaatcaacatggtcatcaagtgtttccaaattgataggatcgtagctttgttgtctctttttcctaagcacacatacaaaaatataaccatatgtaatatagaaagataaacaatgaaaaagaataaaaaatatagtaatagctattttgcaacctcaagttgtagcaaacatagactaaatcattaagtttctgatgctccaacctatttcttttctttgaatgaatgtgctcaaatacactccaattccgctcacatcctgaagcactacaagtttggcttaaaatacgaatagccatcttttgtaaatgtggtaccccacatccataagatgcccaccattgatctaaaatattacatgtcataaatacattaataacaaatatattgacaacttcactaacaaataaatattcaaaaggattacaatttacaagttttgaaagttacctggcatgaatgtatttcgttcatccaaagcagcttgtcttccaaaatccagctcagcattactgtaaattctcttctcactagttagctttgttcgcaactggctatctccatgagcatacctttcaaagaatggagatttttgtgaagttgtgaatcccaacgatgatctaagattttcaagtaagactccacttttgttttatttcttcgaaacctctttaccatctcttctctagctttatacatggctcggtaaataaaacccatagctggtttgtcttcactatcaaccatacgtagcacacgtacaagtggttcagtcagtttcactatatcagcacatttactccaaaacctagagtctaagacttgttccacaaattgtttttccttgacttctttggcataagctgagcttgtccattctttagaagttaccatgactcttaatacatctttttgagccaaaatactctgcaaagcaatgaaattagtgacaaagcgagtaggagcaggatggagtatttcccttccacctgtatgctttctcataaaaaacaaagcaaaacaataattataaatatatttagtaatttgtgaggcatgtgacacagcctcacaaacttcctccaattttctgatgtcttgcaacatcaaattgatgcaatgtgctgcacaaggagaccaaaacaatttaggaaactctttttccaataacctaccagtagcaacataattggcagcattgttagttactatgtgaactacagtttcaggaccaatacgcaacacgacatccttgaaaagcttaaacaataaatcaacagatttagaagcataagagacatcaacagatttcagaaaaacagctcctttaggacaataaaccaaaaaatttataagagttctcctttttctatcattccacccatctgccataagagtacaaccagtttttttccaaatagaacgatactcatccacaagttcatgcacatcatcaacccaactatttaataaatcaccacgaagattgtgcatacttggagccttgaatcctagactcatgctacagagagcatcaatcattggctgaaaatatgctgaattagctgcattaaatggaatagatgcatcaatgaaccatttagcaatagcaaggttacaccttcgtatcacttgtttactttgcatcacacttttcaaggtaggttgagatccaggagtggttctaggttgaaaataattcccaatacgaccaactttcttcactttttcaaatgtccttggtgtttgctcactttgttgttctatttctattggcatttcaccaccttcttcacttggtgaataaaaatcatgttcatcatcaattcttctattcttattcttacttttattgacttcaatattatgtttcatttgataacgaacatcggcaggaaccttagtgcacatagaaacttgacccttttcaccagccaagtgactctttaatctattaattccacctcccctaacaattttatcacgggaaatacacatcaaaacattcttgtcaccatcttgaatgagcttacaatgtgcccaagctatgtcagtcttggctctaatattaggccttgaattttcagtagatgtttcttgttcttgggatgttggtgtttcaccactagatgtcatctatgattcatacaattaaacacttaacaaattcagagatgaaattagaatcaatgcaaagagataaaattgctagcctcaaggagataaaattcacaaggaatgatggatgatgactagataaaaatttatgccccaacagtagtactgaacaaaaggaagtttagttcatctaaccataaactaaaagccctaaatattgaattacagagatgtgattcaaattcttttatcctggaaaatagctagtcctcacattccattcatgtaaacttaaacaaagtatttttaatcaaagtcaagttcaacataacaaagtattatccttcctatctttaatggatgctaaactatagtagagttgacaaagtttgaaatttaccagatttgactaagttttttaatggataccacattatactaggcttgataaaatatagtagagttaacaaatttaattaacattatactaggcttgataccacaccagattttcaagtaaggcaatatgttaacaacttaacatttcagttcaccacaggcacagagttgtatgataagattccacaaagaaagaaggattcattagacaaaagagacataatgaggatgtgtttcagcgaaattaagaccactggccctgaaacataatcatttcactaaacaaattcagtgattaaattttgttaacatatagcgaaacataatcatattccttccttgaaacaaaaaatcaaattacaagcatgcgttcaaaccaattcgacaatatgaaattaagaccagtttcagatcaaaaaatcaaatatcaggtatttatatatgtgaaaaaggtgaaacaagaccaattcgacaatatgcatttcagactttcaatttcagttgcaatattacaagcatatacaaacacattttagactttcagtgataatgagtttcaaatttcaatgttacaagatgaaggtgataagcagcagatgagcagattctttactttccctttcttagagggaggaaacaaaatattgaaaatagaatagcctcagccctcagttttaccttgtcactgctcaaggctcaagaggttcgccggaatcaaatcggaatatcgaagcggaagacgaaggttggatgtcacgacgacacctgaaggtcttgacacttgaagatggaggtcgcgacgaagccttcgcgctgctgtgtttgtcgagaaggaggtctcgaagaagctcaagctgcgggctgctgtgtttgtcgagaaggaggtcacgaagaagctcaagttgcaggctactgtatttgttgagtggagaagaatgaaagtgaagagtgaagacggaagacctaggccccaatgccaaaaacgacgtcgtctttgaagctaggagaaaaactgaaatcactttgttgaccaggattgagttggtgggtcaccattaactcggtcgggtcgttctggcgaaagcggttcaaaggcatgcctgatcagatgtagaacccgacctgatctggccaccggttcctggttggatcggtcgatccgattctgaaaacactgcatgtacatctatctactataataaaagaacatttttttggacacatgtcatcctctcagccactctcagccctctccttcatcctaagcttttctcaatttttcttcctcaccttcacacgcgctcagtatacaaaaaactggcagtgaaggttattcaaatttcaaaatgcaacatttgtatttccttcagcttgaaaaacaagcgcctttccagaggctttcaaattttgaattttaaattcggattgaaagcatcgttccatacactccctcacctcagccaacttttctcaattttcttcctcagctcacacacactccctcacctcacacactcccttagccacggataataagcgtcattccaaaatgttcaaattttgaaattcaaattcacggttcctcacctccacgctcccttaactcacctccacactctctccaaaaaaatttccttcattctcgctctttctcttctacaggtaattcttcttcttcactcttcttttcttatttgtttttggttctttggtgtcccaaaaatgtaatctttttggtctttcccgaaaatgtaatctttttccggccatctctggtcgtgaaccaagaaatcaccaccatcaattgcctcctctccatgtccgcaacaatactctaaactcctcttcatgttgttcttctgcttggtgagataagattttatgcacataacttgtttgtacaaatttctctatgaagacaaatacagtttttttggcctatctctaatttcttgcaaattattagaaatatcagtgttttctatcaaatttttgtcaattcttctctattttcttcattccgtaaacttcatcttcttcttcttttttaattcatctcaacgttgaatcttctactgttgtttgtagacattcaagcgcaagattggaggtcacagcaaacacggccacgatcatgtcaaattcatccaatgatccaattgcgacaaatgctgccccaaggttttatttatttatttatttatttcactttcttccaccttcaattttttttgtgagcaacatttttgcataattatttgcggtttgtgaaaaaaaaaaacaggacaaggtcatgaagaggtttttggttaggaacattgttgaacaggctgtagtcaaaggtgtgcaggaagcttgtgtctatgaacataagtttttaattcattatttatttattttcaggaaaacttcacatatgtttatgttgtttatttgggtttttcttttaattgtttatgtacataatatagacttccaaaactgtatgtgaatatgcagtattgtgtgaatgtttgaaccttggatacttattgttgataaagaaggagaaagccataatagtgcagcctaatcgggttaccattggcaatagtccttccttgggctaggttttcatggctgatttcttgaccgcattggataaaaaagtcaagaccaacaccgcagttgtggagaattaacgacgtatctatgtcccaccaggcattcctttgaggcgagagaaggatgaaccacttagagttaatgttctattcaagcacattcaagtaagttctatttatagcctccttcaaattttagatcaagcagttctttggcagggattggaattggagttctctacctgttatgttactttgttttgtaataagatttcattctaaacttgtgttttatttttatgcttaagaacaagatagttataatcatttgttctgtctatgcttgaacattatgagctccacatacaggattatatttattcaattgaaataattatcatggtcttgcttaccaactgattttaggtccagttttcatctatcatggtaataactgcatgattccttaatcagattcatcatgttaaaccatctaatagtcttcataagtagcttcatggtttgtatatatctggtaattgtgaatggactagaattgtgaaacattgcacaaaaacggggaacatagcagtttcagattattcacaaaacattactaaatatgtgagattatttgcttgatttcaatccaattaatatatttaaacaagttttcccttttaggccagtaattgaatatgttgaacaggaactgctaagctgagatactgttgtaatagctgaaactggagactcatggttcaactatttgaaattacactccatacattttgacatagaaataaatgatatcctaaccaagcagtagcaagatagattagatctgagattagattgcgtgaagggtgtgctaggtcgattgatatcctaaccaagcacctcaatggatctgattatttggatatagaaataaatgaaccatacatggtgttcaaggttaatatttagatctacagcaatacatatccccatttcctttcactgatataaattatgatgtaatatattatagcccttgaaaacttattgaaccttttccttattatgattaagatttccagctttaaatgtcaatattgtttgacaatttaaataacaatttgacgtacatggtgcaggggttgacagtaaaggaaatggaataacttcgtgatgacatcaaaatgcatctggaccttgatagggccacacccacccatgtagaatattgggaggtatcatctttatccattgttttatactatggatttagatttcaattgattcatttcagattacccttaccattggaaatgtcttatctcgaaagttgaagttctaattgtacctttgtttttgttcattatagttatactatttttgtgcccataagggtattcttactggattttaaaagggttgatacatcatattacttgagtcatgtgaagtgagcctcacaaactctttgattgaaaatttggagtgaaaaatttcttagtctttgtttataaccactctaccttgagtttcagattgagggttgataatacaatgcatattttggccaataaacattgtgttttttatggattagaatataatgtctaatgaaatgaatatttactttttttcccaaatttgtgcctcgtggacttccttttacaatctaatgtctgacatattttttcaatatgactggaaaaacaacttccataaaaatgtctcattttactgcaagaatatcacactgtaaaatgaatactggtaacattgccaatttttcatttttattttatttctttgagtttatcataatcatttttgctcataggtatcctataatggaaagtcatgcattatttatgggggaaaatttctggtttctgagttgaaaaatgaactgattaatttatttgaattaaagatatctatctcaggtacataaaagatgtgtctaaacacattaatgaattgattgatattccataaataataatcattgatgtatatgaaatgaaaccataatatgatttgactttcctgtcagtgtcgaggttgtgatctgttggatatttatgctacgccaactttagttgcaaaggaaaacttattcctggaccaaggatggcaggtagatcatgtaatttttgctaaaaaagaagtctttttttttaaaaaaaaaaatactattgtgcatcaggtatgtgattcaatttacatttcttgaaaaccttctaaatgatgaaggagtcatcttggcatggagagtatgagaacatagcagaataaactagaaatgggtcagatagtttttaatatggaacaaattttaaattgttgttgcggtttgtgacttttcttgatattatgggaaaattgcggtttgtttgtggttgcaaacattccaacaaccttgatgttgcaaccgtgaatcattttttacaatcttaatatagagcatatgtttggttgtcatttcaacaaaaaaaaaaattccatagtgaatcatccctctgttttcatcctgctggttacatctttggcatgactgttatgttctatactcagcttacatatttaagagtaatatgatgtatatctcagccttaaaggctactcatatgtccccactaatcagtgccaaacatgggaatcacgtagtatacatttaatgaacacttaaagattgttttggggattttggctcttaaaaattataccttcactggagaaataaaggatcatatgaatcctcaccaactttttggtttcttcttccaaataaactataaataattttactttcagtcaaaggttggccttgagaaagaatttcaagtagttttaagaaaagtcaagggaacagatgttgatatttctcaagaagctgatgaaattcttgtactttccaagctcccttaagtgattgagcatctttaaaatattccctaatcaatttgacatacttgataagctgagctgagttgtttttgtgaacagaattatattgaaactctacaaacccttcctaaaaccgctggatcaatgattagaccatacaaactagaaatgcaatagaaatataaacatctttttataactatgcttataaggcttgcacggttctcacgtgactatactggtatgcccctttatgattgtttccttagttttgaagtccagcaatgtgaattaggcagtcacccctttctgattttgagaatgagggttaaaattctttcattttgtagtagaattttgggaaattaattgagtggaggaggggctggagggttttaatttcataaagggacaaaacttaggttcagtatttaaggtgttttagtgttgtactctgatcaaaattggaccttaacctttgtaatccatacaatgaaggtcaactttaattattgaggtgaaactccaaaactggaaaataacaccaaaggcacctaaggatagcatattagtactgcacttaagttttgtccttcacaaaattctgctggaataaagttgttactaattcataaaattgtgagtttgatcctgtttattatttgatcatcaacatatttattacattaaaaagtttaatagagtgctattaatggtaaagttttgtaagtttatcctattagccatttgattattctcatgtctgttaatgcgggatttagatgtctgataaactttatttctacaggaacgagataaggttttatttggttgtctttgacccaacaagatatgaaaggccgataaatgtgactgaactgcagtatatgaccttgagttattgcctgtgagtgtatactagatttttaattttgtgggccttgcttcctttctctcacatgcttaatgactagggtggtgatcatactgaaattggtgaaagaggggtaaacatcagtgatggccaaaagcagagagtatccatggctatagttgtctactcaaattctgatgtgtacatctttgatgaccccctaagtgctctggatgcacatgtggctagacaggttaccttcgtgccaattgcctcctctatagaatgatctactgttgtttctattgcttcagtgttcaaactcgaaacatatgtgctttagtgttcaagcttccatgtgtttgaaattcatccttgaaacacagacaggatctggcaattgttttatgttcatgcataacataataacgtatgattaaatttgtaatttatagtgcttttaggtctaggattttatagtggtgggggctccttttttattgatccaaaacaaaacatggaagctactttcttctttccttggctgtagatgtcatccatgatgccttctatttatactttgaagaaataataatttagttttatcaaatttaaagctgttgtaactttaggaaattggattgatttataaacttttttatataaagagcaagatataagattttttcatgtaaggaacataataaagagttataatttaacctttcattttgagtgttcagattaatttaacttttcttggatcattacataattcataaaaataatgaaatagaatgaccatttttggtatataaaatatttggaggagaaagtgctttacaattatttagtaatttttaatatatttctaaatttttaaattattaatctcaacaacatttcatacagtttaacaagttgcaatttttcaattatatacttatttttatctctttattcatgtgtccttatcaagaaatacgaatttaattcttagtttacgataataatatgaaaaaagttgtgatcaataattattataactacttactgtaatttctcagacaaattccttatacatatccattggtaagtgaaagatatataaaaagcaataaaaatagattcagatcctccgtagttgtttttcaaactattgaaggattttttgtctgtgagaatttggttacttaactataaaaaagtctgagaattttagcaaatgacaacatggaataacattcagttttgtgtattttgaaactattgcaagataaagtaagtgtcgggctcttttagcatacttccagtcgtgaacaagtttgtaggagtattcataactatatatgatttgaagatggtatcccagtgatcaaaatatagaaattgttaaagggagaggtgattaccagttttgatgtataagattcataactatatatgttcagagtcttttatatgcatgatgaggtattttgatttttgagggtgatatgatgatgtgtttcttaactcaaatgattttttctatcgttcatttttaaattttttttatttaaattcaattttcatgtaatcatcatgataacatttaattaatatatttattagaaaataataatttgattttttattatatgacaatcaaaattaattaaaattattttatcaataatattataaataaaaatattttcagttatgatagagataaaaataaaaataaatttataaaactgatttttattaaaaaaatttataaattacttactcattgtatcataatataaattagttttaatttcattttttatgatagaaactataattatcatttacgataaataattattctctaggtcatcgtaagtgattcattaaattttttcttaaaaaaatatttaacatatttacatctaaaacaatcaacaatatttatttttactaaatatatattattttttgaaaaattattatcacataatatacttgacaaataacagtaaaataaatagtaacattttaaacattgaatccgttactcgatcaggcatgctttctacttttattgatatttttaatattttttataaaataattatatctatttcaaaatttggccatgattttctaaattaaatattttaaattaattctaattttttttataaaatcactttaaataaatttatttacactaaaggacaaatccaaaaatagataaataaattgctgacaagtaaatgagtggttacatatatggttgtacttattaacacttcttagattttcatttaatacatatttgttgtccatctaaaaaaaagagagaggagcttctgagaaacttatgcgaaactttttatatttgacctcgctttaaattatgcatacatatatatatatatatatatatatatatatatatatatatatttatcttacacctttaaattgctttattatatctctatattcttattaatttttttcagaagcttttatttatttattattattacgtggtctgctggtcatcccacaaacgccctactgaagtccgttgcctaattgatgtcgataagactatcgtggtcaaaacgcagacaccagtgtcatgcgctgaaaccttatataataataccactgtattatcatatatgaattaagcacgtggatgtcatatatgattgatttgcattatctcatctgagaagcatggacatttatggacattttaactaccattatcatgttatgtcataaatctattagatatgtattaatatcatatataaatatttttaattataagacttaaggacattttctaaaatatgtaggtatttatctttcataacaaattttcacttgatcaactttatgttccaatgtcatgttacatcatgttagggttagaagaactgataaaaaaaatgttagggtttgaagatatatatgtaacaattaaaatcatttttcaaattaaattctaccataaatgtaatttaccaataagtattttggaatttaaaatcggtaactttaaatttaccagatgcagtacttctctataattaaactgatttttattttatttatttatttctcatttctatccatgcataaaatacatatttgtaaattatatttctcttttatttcttccctcatctaaaagaaaggaaagactctaatgacaacaaattaaaagtcgtgtttatttctgaatatcaattaaattaagcacatttcatctcaaatttaattttatattcatttttagtgaattttttattttttattctattttagaaatattcatgttctaaaaaattaacaagaatgaaggataaatcatgaaataatttaaattataaaataaacaaggattaaataagttttaatccctcaacttttttagattctaatttatagtgcttcaattttttttgacaacttttagtctttcattaattttctgtcaacatttttatttgctcaaaaaaagaatttgcctatttttagttcttcatttattttatcactaaaaaattagttcaaaatatatacaaatgagaactgaaaatgaacaaaataaggactaatcttgaatgataaaaacaaatgagagactaaaaatagacaaaaaaaaatttaagagactaattaacaaagaactaaaatttgttaaaaaaaacttttgaaagactaaaaattgaaatctaatttgagggacttaaaacttaattaatccaacaaacaaccatatttctgtcactgtttaacaataactatattaaaatttaagaatgttaaattaccaaatttcatatatcaccttctcatatttaattcctttaaaataaaaatacggtaagtttaaaaacatacccgtatccatcattaataagagttaattaagattatgcttttaaaaaagaattaattaagattataagatattttaatgcaaattaattgtaaatacgctcttactttttaagtgtatatataaatgttaaaaatgagttttaaacctctaggattattgattccagtagatacactcttacttgttcgtcttatagattactcaaacaaaattccatctcatcaatatactgtctttcagttaataaaatagaaattttgtgtagtaaaataaattacacaaattcttacattttgtttttataaagtatgcaataacataaaacaaaatgtactccttaaaagtagacctatttgtaaaccgggaaacgaaaaaatataaacattttgggtgaaaaatataactgttcactctatttgagggtggaagaaaaagagggaaagagaaaaataataaatatgataagtgatgaatgaaataaacgagaaataaaagaaagagtaaaaatgaaataaaataaaaatatatataattattcgatgaccgtccaagcctctcattcttcgttcttggatttccttttgcgacaaagaagttcctagttttagtggtgtctaaaagtcaaaggactagaaagcttcactgatcaactagaatcacctcacaagtcacaactaacaagctatggatgtaccatacatatccgtgagaaataagacaagaaaacaaatcggaaaagtggtcggtatgctacacgtgcacaaaaaaatagatcttggccaagtttatttttatttatttttctgctcatgcatatttatgtacatagtttttaggataataacattaatatcacataaatgataaataattttattattaaaatatatatgtgacaagtattaaagtatttagtaaaagatgtcgatattttaaataaatctcaatatattaagtaattaatctttgactcttggtgaatgaatatttccatcagttcattcccaaaaatattagaataaaaacaaataaaatgttcacaacttattaaaaattaaaaataaaaattgttttatagtttggatattttattcaaatgcggttaaaatctatgcactttcatgttgatgaattttggtcctcgatcagattttaaaaaccatctgatagtctttcataagttaaaaatatatcataaatccttaatttgaaacgagactaaatatgcatttttttttatagtttgagaacttaattaatattaaagtatagggatttaaaccacatttgaccgaaagtatagagattattaacataattttgaaattaaaataatatatatatatatatatatatatatatataaaatactaaatatttaaatttaaaattgcaaaatttttgtatctatatttttataaatacttaataaaactatttaaatcttataaaaccaaattttagttttttttgcagaataataataactaagtttgaatttaggaacctgaccaaactatccaaacatctaccactaagttcacgatcctaaatggtcaaagaaaccttatcctaaatcctggtattaccatgttgtaattatattttgatcagtgatatattttttttatcagttacatatttcggtttcaacattcaacttagttaaaaaataattcatcattttatacaaaaataattatttttaagttgttttacttagtagttttttccttttacttgtttctgtaggctgtagagtgtcttgtcttattgtcttactgttatcctgaattttgacttatgaatcatgtgctggaactttcttgtctctctctgacaaccatttgttaatttgcggcgccattcttcaatgtcttgggttacacgaagacacactccaccatggattccatcaataagcttcgactatatatataccccactaagattgaacttgcattccaatccaacgctgagaatcattaacagtgtagagtttgttcgaaaaacagtgagaattaactagccatgctgattttcttcttcactcttctagtgcccttcttagggtttctccttctgttgttcatcacacaagcagaacaacaaggtagtcataattataaccatgcacctctttcgcacccaatcattggatgcctcgtctcattctaccaaaaccgccaccgtctactggattggtacacccaacacttagccaattccccgacacagaccatcgtggtgcgccgcctcggcgcacgacgcacggtggtgacggcgaaccctggcaacgtggagtatattttaaagaccaacttcggcaacttccccaaaggcaaacccttcaccgaaatcctcggcgaccttctcggctgcggcatattcaacgtcgacggcgagctgtggcacgcccagcgcaagttagcgagccacgagttcagcacgcgctccctcaaagacttcatcgtgaagactcttcaagaagagactcaacaaaggcttcttccattgctggagcatgccgcacgtgagagccacgtgatcgacctgcaggacgtgctgaggaggctcacgttcgatactgtgtgcagggtgtcgctgggctacgatccctgctgtttagacctctcgaagcccctgccgccacttctgacggcgttcgacaccgcatcggaggtcagcgctgctcgtggggcggcgccggtgtttctggtgtggaagatgaagagaatgctcaacgttggctcagagaaatcattgaaggaagcagtgaagctagtgcacgagtccgtggtgaagattataaaagcgaagaaagaaaaaattgcgtttaatgaaagaaattgcggcatggatttgcttgataggttgctggaggcaggacacgaggaaatcgtggtgagagatatggttataagcatgataatggcggggagggacaccacttccgcagcaatgacgtggctgttttggttgttatcgaagcatagagagcaagaagaatcgttagtgaaagaggtttcttgcggagaaaacaaaaatcagggtctgggtttggattatgagtgtttgaaagaaatgaaattgttgaaggcatgtttgtgtgagtccatgaggttatacccgccagtggcatgggactcgaagcatgcgggtggtgctgacgtgttaccagatgggacccacgtggggaaaggggatagggtgacatattttccttatgggatggggagaatggaggctctgtgggggaaggattgttgtgagtttaagccagaaagatggtttgatgaggagaatgtgaagaaaggagttctgaagtatgtgaatccttataagtttccggtgtttcaggctgggccaagagtgtgtattgggagggaaatggctttcattcaaatggaatatgtggtggcttctattctcaaccgctttctgatttcgcctgtttctgatgactatcctcgttttgttcctcttctcacagctcatatggctggagggttcaaagtgagggtccactacagaaatggaacttaaagtgagaagattcaagagtgaatcacaagtggggctcaaattttatgttaactaatactgtctcctgcttggtgggacggtagcatacaatttttgcctttcatctgcttcttctttggtttttagttttggtattggattggcatgcttgctgcttggaccaaaatcatcttctatataaagtaatcttatattgtttgatgtcatttatctttatgcacctgattataaatttatataaggtgtaaatatattttttgtttttttttttattcgagataagtttctttctaatcttctaaatttaaaattgatattttttaattattgtaatttgaagaaaaatattgtttcagtctctctcctcaactaccttttccccaaatattgtgtagtagggtgattaaatttaataacaagaatataaattacaatggtttatgtcataagtgcctcataatttgttagtaggtaaaccaagtttgatcatattcaaaaaaactacatgccaaacattttttggacacgactcacaaagaggacatgtgatccattcggcattgaagtctttgttgagaggcattgtcttgtaggaacacaacctctaatcgatccttcttcttttggtaaaaacaaatatttttgctctttattgatgattttagttggaagacttgggtgtatttcttgaagaaaaattcaagacttttgtaatttttaaaaatttaaggctcttgtagagaagaagaatgactatgtaatgaaggctataagattcgatagaggtggcgaattcacatcaaaataattcaatgagttttgtgaacataatgggatttatcaccctctaacgattcctagaaccccacaacaaaatgggtggtggagagaaaaaataaaattattcttaatatgactagatgtatgacgaaagctaagtatacgcccaaggagttttgggccaaagttgtttcatgtataatttatttatccaatcattctccaacaaagaatgtcaaaggtcaaacacctcaagaagcatggagtggagtgaacccaagagttgataatcttaaactctttggaagcattgcatatgttcacgtgctcgaccaagaaagatccaagcttgatgataggagtgtgaagcatgtgttcattggttatgaaagttcaaataaaaggctacaagttgtacaacccaagcaatgggaatattgttgtagtagtgaagaaagaaaaaagaaggaattaggagaaagaaggaaattatgattttttttccttattttgaagataatgatgaagaagtcgtagcaccaaatgagttttctacttaacctccttcaccaactcattcaattcatgaagcatcatctttcgaagggagttcaagtgaaagaccaagacaaatgagaagtctttaagacatatacaatgaaactgaaattatgaatggtttttttttttgtctttttgttcacaatgaacctttaacctttgaagaagctatgaatgacaaaaggtggagacaagaaatgaagaaagaaaccaatgtcatgaagattgcaacttgggagttatcaaaacttcctaagggttatgaagaaattggagtccaatgggtgttcaagttgaagaaaagattgacaaaaagaaagatgtggagttagttcatgaagacacaaaaccaagttgcagatattttccctaagtccctcaagtttgtagatattagaaggttgacagcaagacttggagtgtagaaaattaatggaggattttttaattaaggggcgatgttagaaataataataataataataataataataataataataataataattagaaaatgaaggatttgagttagtgttagataatgaaagggtgtgggttaataagaattaaagaacattatttttgtaaccactatgtatttgaagggttatgacattatgctcattttgtgtcttaatgacgagttacataatatctataggttcctttactataaatctgacacagtcaatcatcactctggacctctcctcggctttgcatgggagagggtagagaccaaaggctacgtagaacttataaccaccttcagtaaaggccagctctcaaggagcttcacaatcagttatttaattatcgacgcagatacctcttactttgctttgattagcaggaaaacactgaacaaactcggagccatcgtttccacgccttacttcaaaatgatgtttcctaccttgatggaagatatagtaactatcaaggcagaccaaaaataagtctgacaatgctatgcagagagattgaaagtagcaccatatcctcccaccaaggagctcgacagacatcatcccacagggggtgtaccagccaagtcatgaacgtgaacgaaggtctccaatccaaacccttaccgtctacgacacaagtcaagatggtgtatttgacgtggatccgcgcgacgacaccatcgacaaaaaggccaaagcctatcaaagaacttgtcaagctgcagttcgaactcaaacctgggcagtgcactcagctcagcaagaacctcactagccatgatcacaaatgcatagctgaagtcctccacaaaaaacacaaacctgttcgcctagcagccatctgacatgccaggcattcacccaagtattatatgccagaagctacccatctgccctcagtacaagccggtttcacagaagaagaggaagatgggagagaagtggcgcaaggtggtcagagaagaggtcgacaagctgctcaaaaatccaaaatcatcagggaagtcgagtactccacctggctcgccaatttcgttatggtaaaaaaagccaacaaaaaaatggcaaatgtgcactaattacaccgacctcaacaaagtgtgtcccaaagatgcgtaccctttagccagcatcgacagattaatcgatgatgcgtctgtgttctaagtgttgagcttcctgcatgcatattctaggtataaccagatcataatgcatgccccagatgaagacaagacaacattcatcactaaagatgccaatttttgctacaagggtcatgcccttgggcctaaaaaatgcatacgccacataccaacgactgatggattaggtcttcaagaaaaatcagatgaaacattgaggtatatgttgccgacatagtcgtcaaatcttagagtatagcccaacacgtcacagatctagatgaggtttcagagagatccgcaaatataacatgtgcctcaacgcaaaaaaatgtactttcagggtcggcggaggcaaatttctaggcttcatgatcacacaccaagaaataaaagccaatcttgacaagtgcacaacaatactgaagatgcacagccctacaagcttttaggaagtctaaaagctgaacgacaagctgacatctttgtccaggttcctctgaagttggccgaaaaagtgaaacctttttacaagctgctcaaaaaagccgagcccttcctatgggatgaagcttgtgagcaggctttcttggcctttaagaaaactattgccaagctgcccatccttgttagacacaaggggagcttgaagtggatcaagatcaggaagctcttttgatgttttagccttttacatgtcattcaattgaagacatatgtaatttgttaagttgtttaagagcatcatcttatgatcccctacattgcataaacatgatcattagcatgcatacatgatttgataaaagcataaaggttttgatgattgcataaagaagcaaatttctcatgacttaggtttttgaaaaattctttttacactgctttaatcaattacacaaggatataatcgattaccaacttctatttaattttgaaaaagccatgaagaacactttaatcgattacaagctaatcgtaatcgattacatagcacaaaatgaaaatcaataactatttgtcttaattgattatcactctactgtcatcgattacataagttcatttctaaatatgcatgactgtcttaatcgattaccactcaatcataatcgattacatagacttatttcaaaactgagcatgactgctttaatcgattacaagctcaatttaatcgattacattgttcataaatcttttctagaaagctaaaaaacattttaatcgattgagtttgtatttaatcgattacatatggtgatttttaatcgattactttggtgatttaattgattacattcagttacaaatgttttctataaaaagatgttgagtcttttgttttgtatagaacttgattttgggaaatacccattacttacaaaagctttcatagtctgggaaaagagattctgagttacattgatcttgtttcaaaacccagaactcatgcatcattgatcatgttggtttgaacaacatttgtcaagaatttttcaaagagagctgattccaagaattgtttacattcaacctgagtttgtttggtgaaattcattcattcatcttttgaggatcatgaggttgtatctctcttaaacacttgtagtgatttgattgtttacttttatttcttgtaagttcttagatcaaagagattctttaaagctttttctagagtagggttctctagagggaagaacatagtagtgttgtctggtttttggtcattagaagtctatagggtttagatttttgtttctttatctagggttgataaaggtgatcagttgtaaaagcttgtaaagaaaagtttgatttagtggaactctaaccaaggtttggttggaagaaactagatgtagcttctcttgttgagaggtgaaccagtataagttcttgtgttaattactttcttttaatctcttctagctatcttaatctgtgattcttttggtgaaatctgttattactcaacgagtgaagtttttagtaattgtattcttgaactgagtggtttgattgattgaagcattcttattgtgataaagatcctaaatacgctgcttgttttaaagaattttttaaagactctgttttaaccaattcacccccctcttggttattgtgggtcttctcattgttttcaattggcatcaagagcaggttcttagtgttattcaagatcactatcttttttaaagaaaatgaataccacacaaattaccttcagagagggtgccttcctcatttgtcatccaatgtttgaaggagagcatttcagtttttggaaaaacataatgcaaatattcattcaatcaaataaccccggtgcatggaatgcaatagaaaaaagtcctttgattcctatgaaaactattggtaaaagagagctgttcagtatgattttaaagctaagaacacgattacttctgcactttcgtctgatgaatttttcagaactgttaggtgtaaaagcgctaaggagatatgagagatgttagaggttgctcatgaaggcactgacgaagttagaagatcaaggaagcatgccttaattcatgagtatgaaatgttcaagatgaacaccacagaaaacatatctcagttgcaaacaaggagaaatataaagatttcctaacgaggctaggcgtcaagaacattgtgacttctatcgaacatccctaaacaaacagttaggtggaggcaacaaacagagttatcctcaaggtcctatgcataagactcgacaagtataagggtctatggaaggaagaattacccagtatactctaagcttattattgttcaaccaaaacaactactaacgagagtcctttccaactcacctatggcacaaacggaatgatccccgttgaagttggggaaccatgacaagaaggattttttttcaagaacaacataatgaagaaaatgtgagggttgaactagagacaaaggacgaagtccaggaaatggacaacataaaagaagagaccactaggcttcgcataggaaagaagatataacactaaggttcaatctcgaaccttccaatctagcaatctcatatagcgagtccgaggtgaagctagaaaagatcccgaagtgggaaagcttggaccaactgggaagaaccatttagggtcgtcacaagcctagacaatggagcctataaattacaagaattagatggtaaagtaattccacgaacttgaaacgctacccatataaagttctatttcaagtgactttctacaagatcggatgatgtactcttttaacgaggtacatctggggagtaaaagaaaatttgtactcaattgctacattgaataaaaagtatctccctttaaattttacttatgtcaactctccaaagtcttgtcaaacccaaggtccaaccctggtgaacctcgccaaaaccaaggacggacgagttcttggtcgatctcaaaggctcgtaaaacccaagatctgtccttcatgagtctcagtctccaaaggttcacaaaacccaaggtccgcccttggtgaaccttgccaaaacccaggacgaacgagttcctggtcgatctccaaaggcttgtaaaacccaaggtccacccttggtgagcctacccatttgataagtttcccccatgcggaaactcaaggtatgcaaggtccacccttgacaaacttttatactcctaaaatttgtctttgtaggaatacaagaaacccaaggtctaacgttggtgcacaacaaaaattcagagaggaagttatgccaaacaaacctctagtgttgctattgttttcccctgtgaagttgttatctcggtgagctttttctgattagaggcttcaacatctattctgtagtcataaagcaaaacaatagcaactcagttttctcactttatattatggcagcaaacatggatcttctgataaatgaaacatttcaaaagttttataataactcatgcaaattaaaaatatttgaacttgatccaaaagcaacaatgaatcctgttgcctaatattacacaatagacattcaataagattatttcatatcttatcaattgaagcaactttaaagtgcatctgtgctttacaaatagcatggaatgattgacttgtcagtataccgatagatataatcaactacttatatgtgagaccatccaaaagtaaatcaagaaagcaaaagcttaagcctgagaaaaaaaattattggatttggtttatctttcataaaaatcacactctatttataaagtggccttgccattttatttcatttttctttgttattagttaaaggcatgtattagtaaattttgtagaattgtagtccgtgattatagttgagcttatattgccagaagcctggaatcatactcaatgtagaacagaattgtccttattagaaaaatcgttgtacaaattatttcattaatcattacttaaattggattataacatcaaaaaaatcaaataataaccatagagagaaaggataataaccaaatacataaacagttcatcacaacacaatttatacaacaacataagcgttatcccactacgtgaggtcagctaaatgaatcgcacgatgtcattcagcttggttaaagataaaatctccagaaattgataagcacaactaatagactcaggaaattaatcttcagatctagcctcaaaactcaactgtctagcagatatggtacaaagaaagtgacaattgaaactcattgcttcacattgaccttgaagcatcaaaattgattttgaacccggtgatggcaccttgcgcaaactgaagtaattcctctcgcttcacctaaagaacaagttaagcatcaaacaatttcattgaatgcatcaaagaaggtaaacatattgaacaaggtaaacattgaaacaacttgaacatggtaaacataaaaaaatctcactgaatgcattaaagaacaaaagaggccaccactatgcattaagagaaaacatgggagtttaaacccacaaattctccagcaatgtctcacaactctagctactaagttttgagttgtctaaaggggggtacatttcattttaattactttcaatgagcacttttaggtcaccttttaaattgagtcaccaacagatcccatgttaagtcataagcaacaaaatttccagtgttggaggagtgaatttcctagcaaaaattaattacgcaaccaatatcatctttgcatttctttctattgtagcacaataagagttgattgtaggatgagtaaaatcaaagcacataggtgaaggaatcaagagaccttgcccacacattgggagtaactgggagaggttttacagttactggggtaagaaaaaactgaggttgagacaaagaaaacaggatatagtgcaggagcaggacaagaataacatcagtgaaaaccaaaacatgacctaaattaaatgcaaggtatggtacaaccactttgtatttgcaccacaaaattttccatgcataactgaaagcattaaaatggaagtagttgcttacccaaatgacaacaacaataaggcatcagcaacaagaatgcggcttcaacggtgacccacgaaatggggtcgaaggtcgtctgaagcttctgcttgtcaatgtcggagtgaaggtatgcgcatgggatatttcacatatgaagaacgctttgatggtgtgcggtgttgagaaacataaataaaacctaatttagaaattgggacaacaatcaacgacgacgggttgctataaaaacgtatttgaattcatccaaaacgaagacgggtttagataatcgtctatgaatgttatacaactacgacggtcttgcttcaaccgtcattgttttgtcttccaaaagtgaaaaattttccatataattacaaaactaccaccgcctagcctactacgatggttttggaacaaccgtcgttgaacgcccgtcgttgttgtgtttgtttgtagtagtgaaaggctacaagttgtacaacctaagcaatgggaatattgttgtagcaatgaagaaagaaaaaagaaggaattgggagaaagaagaaggaaactatgattttttttccttattttgaagaaaatgatgaagtcgtagcaccaaatgagttttctacttaacctccttcactaactcattcaattcatgaagcgtcgtcttttgaagggagttcaagtgaaagaccaagagaaatgagaagtcttcaagacatatacaatgaaactgaaattatgaattatttttttttttatctttttgttcacagtgaacctttaacctttgaagaagctatgaatgacaaaaggtggagacaagcaatgaagaaagtaaccaatgccatgaagaatgcaaattgggagttatcaaaacttcctaagggtgatgaagaaattggagtccaatgggtgttcaagtttaagaaaaagattgacaaaaagaaagatgtggagttagttcatgaaagcacaaaaccaagttgcagatattttccctaagcccctcaagtttgcagatattagaatattgagagcaaaacttggagtgtagaaaactaatggacactactacaggcaacacatacgatgacggttctagaaccgtcattgttgcaggtgtcgttgtaagttggagctttcgacgaagattctcaaaaacgtctttgtaaattttttatttttttgtaaaacatacaagacggttttcgaaacaaccgtctttgtatgggcataggcctctgccattgtcgctgctcctgctcttgcttctacgattcctttatcttctactgctcatgaggtttttgtttcccttactattgtgaccgatgtatcagtttcttctgctagccctatcatggctccttcatccaccaaggctacgcccttgcctagcatttatgcggcggttactagtgctcctaaggtgttgcctccttcttcttcagcctcatcggttcctccctctactgcacgggcgtcgacgttgccttcttcttcctcttttcgccccagtgtctcccttgatcacgtctacacctcgcgtgatacaaactctctgtggagcatagggtaagccaaagcagagaactccaactggcttcatatctccttttgacaaaaattgattcggccagtcatggttcaaaatgctacctactatgcaagggtcttcctttagagaagtctggcgatcttggaggagaacgggaaatgtcaccaggaagctgtgagcaaggtggcatccctagaggcgaaggttgccaagtggagggccactgctcggaccatttggagagtggatcgtcccaaggtgaccaatgccattgtagcatttgttaaggtggtcaggttcatccaccagctgtctgccaaggttggtggtgtcttggccaagctcttctgcattcgattggatggtgacgaactggttgatcgttgcaaggcattgctgagggagaagaaggacctggcttccaaggctgagatcacccttgcagagaggggcagtctatccaagatgatttctaaccttgaggctcatttgaatgcggaagagtccaagctcaaggcgtcagaggagaggcaggctcgcgaggagcttgaagaggagctgctcatctacaagaaggaggctatggagcagcgtgaaaagggttttcacaaggccatcagacaggtcgggttcttggccaaaaaccttgacttgggtctttctgacccattcaaggatgtgaaggacggtgttctgcttgacgaggaggagataattgttgctgttgaggaaggtgccagcgaggagcagggtgatggggccaatgtttaggctgcccttttgtatttttgttttgttgattttgggccatgaaggctttgtaactctaacaattactcttcttaatttaaatggttccctttgttgacaaaaaatttctctatttgttctttgtcttgtatgttgttttcattttttatgcgatgctccataattgtaagggtaggccgctttgacatggatgatgtccttgctgtgtaggaagtgagaccttgacgaaaatagagaccttagatgacacgaaatcatctcaggtttgatttcaacttgattaaaggtcttgtcattcatatgatgatgcttccttttgctttgcagagcttctcccccgatgcttttgaggaggtagtatgaaatccacctgcttgaaggtcttgctgaccagtttggtggtgtctcattttacctcttgttcgagaatgagtgactgaacctttggccatgctagtcgtagttccaaagaagtgggcttaccaagagcgtgacttggattttgtgcaccaacgttagaccttgggtttcttgtattcctacaaagacaaattttaggagtataaaagtttgtcaagggtggaccttgcataccttgagtttccgcatgggggaaacttatcaaatgggtaggctcaccaagggtggaccttgggttttacaagcctttggagatcgaccaggaactcgttcgtcctgggttttggcaaggttcaccaagggcggaccttgggttttgtgaacctttggagactgagactcatgaaggacagatcttgggttttacgagcctttgagatcgaccaagaactcgtccgtccttggttttggcgaggttcaccagggttggaccttgggtttgacaagactttggagagttgacataagtaaaatttaaagggagatactttttattcaatgtagcaattgagtacaaattttcttttactccccagatgtacctcgttaaaagagtacatcatccgatcttgtagaaagtcacttgaaatagaactttatatgggtagcgtttcaagttcttggaattactttaccatctaattcttgtaatttataggctccattgtctaggcttgtgacgaccctaaatggttcttcccagttggtccaagctttcccacttcgggatcttttctagcttcacctcggactcgctatatgagattgctagattggaaggttcgagattgaaccttagtgttatatcttctttcctatgcgaagcctagtggtctcttcttttatgttgtccatttcctggacttcgtcctttgtctctagttcaaccctcacattttcttcattatgttgttcttgaaaaaaaatccttcttgtcatggttccccaacttcaacggggatcattccgtttgtgccataggtgagttggaaaggactctcgttagtagttgttttggttgaacaataataagcttagagtatactgggtaattcttccttccatagacccttatacttgtcgagtcttatgcataggaccttgaggataactctgtttgttgcctccacctaactgtttgtttagggatgttcgatagaagtcacaatgttcttgacgcctagcctcgttaggaaatctttatatttctccttgtttgcaactgagatatgttttctgtggtgttcatcttgaacatttcatactcatgaattaaggcatgcttccttgatcttctaacttcgtcagtgccttcatgagcaacctctaacatctctcatatctccttagcgcttttacacctaacagttctgaaaaattcatcagacgaaagtgcagaagtaatcgtgttcttagctttaaaatcatactgaacagctctcttttaccaatagttttcataggaatcaaaggacttttttctattgcattccatgcaccggggttatttgattgaatgaatatttgcattatgtttttccaaaaactgaaatgctctccttcaaacattggatgacaaatgaggaaggcaccctctctgaaggtaatttgtgtggtattcattttctttaaaaaagatagtgatcttgaataacactaagaacctgctcttgatgccaattgaaaacaatgagaagacccacaataaccaagaggggggtgaattggttaaaacagagtctttaaaaaattctttaaaacaagcagcgtatttaggatctttatcacaataagaatgcttcaatcaatcaaaccactcagttcaagaatacaattactaaaaacttcactcgttgagtaataacagatttcaccaaaagaatcacagattaagatagctagaagagattaaaagaaagtaattaacacaagaacttatactggttcacctctcaacaagagaagctacatctagtttcttccaaccaaaccttggttagagttccactaaatcaaacttttctttacaagcttttacaactgatcacctttatcaaccctagataaagaaacaaaaatctaaaccctatagacttctaatgaccaaaaaccagacaacactactatgttcttccctctagagaaccctactctagaaaaagctttaaagaatctctttgatctaagaacttacaagaaataaaagtaaacaatcaaatcactacaagtgtttaagagagatacaacctcatgatcctcaaaagatgaatgaatgaatttcaccaaacaaactcaggttgaatgtaaacaattcttggaatcagctctctttgaaaaattcttgacaaatgttgttcaaaccaacatgatcaatgatgcatgagttctgggttttgaaacaagatcaatgtaactcagaatctcttttcccagactatgaaagcttttgtaagtaatgggtatttcccaaaatcaagttctatacaaaacaaaagactcaacatctttttatagaaaacatttgtaactgaatgtaatcaattaaatcaccaaagtaatcgattaaaaatcaccatatgtaatcgattaaatacaaactcaatcgattaaaatgttttttagctttctagaaaagatttatgaacaatgtaatcgattaaattgagcttgtaatcgattaaagcagtcatgctcagttttgaaataagtctatgtaatcgattatgattgagtggtaatcgattaagacagtcatgcatatttagaaatgaacttatgtaatcgatgacagtagagtgataatcaattaagacaaatagttattgattttcattttgtgctatgtaatcgattacgattagcttgtaatcgattaaagtgttcttcatggctttttcaaaattaaatagaagttggtaatcgattatatccttgtgtaattgattaaagcagtgtaaaaagaatttttcaaaaacctaagtcatgagaaatttgcttctttatgcaatcatcaaaacctttatgcttttatcaaatcatgtatgcatgctaatgatcatgtttatgcaatgtaggggatcataagatgatgctcttaaacaacttaacaaattacatatgtcttcaattgaatgacatgtaaaaggctaaaacatcaaaagagcttcctgatcttgatccacttcaagctccccttgtgtctaacaaggatgggcagcttggcaatagttttcttaaaggccaagaaagcctgctcacaagcttcatcccataggaagggctcggcttttttgagcagcttgtaaaaaggtttcactttttcggccaacttcagaggaacctggacaaagatgtcagcttgtcgttcagcttttagacttcctaaaagcttgtagggctgtgcatcttcagtattgttgtgcacttgtcaagattggcttttatttcttggtgtgtgatcatgaagcctagaaatttgcctccgccgaccctgaaagtacatttttttgcgttgaggcacatgttatatttgcggatctctctgaaacctcatctagatctgtgacgtgttgggctatactctaagatttgacgactatgtcggcaacatatacctcaatgtttcatctgatttttcttgaagacctaatccatcagtcgttggtatgtggcgtatgcattttttaggcccaagggcatgacccttgtagcaaaaattggcatctttagtgatgaatgttgtcttgtcttcatctggggcatgcattatgatctggttatacctagaatatgcatgcaggaagctcaacacttagaacacagacgcatcatcgattaatctgtcgatgctggctaaagggtacgcatctttgggacacactttgttgaggtcggtgtaattagtgcacatttgccatttttttgttggctttttttaccataacgaaattggcgagccaggtggagtactcgacttccctgatgattttggatttttgagcagcttgtcgacctcttctctgaccaccttgcgccacttctctcccatcttcctcttcttctgtgaaaccggcttgtactgagggcagatgggtagcttctggcatataatacttgggtgaatgcctggcatgtcagatggctgctaggcgaacaggtttgtgttttttgtggaggacttcagctatgcatttgtgatcatggctagtgaggttcttgctgagctgagtgcactgcccaggtttgagttcgaactgcagcttgacaagttctttgataggctttggcctttttgtcgatggtgtcgtcgcgcggatccacgtcaaatacaccatcttgacttgtgtcgtagacggtaagggtttggattggagaccttcgttcacgttcatgacttggctggtacaccccctgtgggatgatgtctgtcgagctccttggtgggaggatatggtgctactttcaatctctctgcatagcattgtcagacttatttttggtctgccttgatagttactatatcttccatcaaggtaggaaacatcattttgaagtaaggcgtggaaacgatggctccgagtttgttcagtgttttcctgctaatcaaagcaaagtaagaggtatctgcgtcgataattaaataactgattgtgaagctccttgagagctggcctttactgaaggtggttataagttctacgtagcctttggtctctaccctctcccatgcaaagccgaggagaggtccagagtgatgattgactgtgtcagatttatagtaaaggaacctatagatattatgtaactcgtcattaagacacaaaatgagcataatgtcataacccttcaaatacatagtggttacaaaaataatgttctttaattcttattaacccacaccctttcattatctaacactaactcaaatccttcattttctaattattattattattattattattattattattattattattattattattattatttctaacatcgccccttaattaaaaaatcctccattaattttctacactccaagtcttgctctcaaccttctaatatctacaaacttgagggacttagggaaaatatctgcaacttggttttgtgtcttcatgaactaactccacatctttctttttgtcaatcttttcttcaacttgaacacccattggactccaatttcttcataacccttaggaagttttgataactcccaagttgcaatcttcatgacattggtttctttcttcatttcttgtctccaccttttgtcattcatagcttcttcaaaggttaaaggttcattgtgaacaaaaagataaaaaaaaaaaccattcataattttagtttcattgtatatgtcttaaagacttctcatttgtcttggtctttcacttgaactcccttcgaaagatgatgcttcatgaattgaatgagttggtgaaggaggttaagtagaaaactcatttggtgctacgacttcttcatcattatcttcaaaataaggaaaaaaaatcataatttccttctttctcctaattccttcttttttctttcttcactactacaacaatattcccattgcttgggttgtacaacttgtagccttttatttgaactttcataaccaatgaacacatgcttcacactcctatcatcaagcttggatctttcttggtcgagcacgtgaacatatgcaatgcttccaaagagtttaagattatcaactcttgggttcactccactccatgcttcttgaggtgtttgacctttgacattctttgttggagaatgattggataaataaattatacatgaaacaactttggcccaaaactccttgggcgtatacttagctttcgtcatacatctagtcatattaagaataattttattttttctctccaccacccattttgttgtggggttctaggaatcgttagagggtgataaatcccattatgttcacaaaactcattgaattattttgatgtgaattcgccacctctatcgaatcttatagccttcattacatagtcattcttcttctctacaagagccttaaatttttaaaaattacaaaagccttgaatttttcttcaagaaatacacccaagtcttccaactaaaatcatcaataaagagcaaaaatatttgtttttaccaaaagaagaaggatcgattagaggttgtgttcctacaagacaatgcctctcaacaaagacttcaatgccgaatggatcacatgtcctctttgtgagtcgtgtccaaaaaatgtttggcatgtagtttttttgaatatgatcaaacttggtttacctactaacaaattatgaggcacttatgacataaaccattgtaatttatattcttgttattaaatttaatcaccctactacacaatatttggggaaaaggtagttgaggagagagactgaaacaatatttttcttcaaattacaataattaaaaaatatcaattttaaatttagaagattagaaagaaacttatctcgaataaaaaaaaaaacaaaaaatatatttacaccttatataaatttataatcaggtgcataaagataaatgacatcaaacaatataagattactttatatagaagatgattttggtccaagcagcaagcatgccaatccaataccaaaactaaaaaccaaagaagaagcagatgaaaggcaaaaattgtatgctaccgtcccaccaagcaggagacagtattagttaacataaaatttgagccccacttgtgattcactcttgaatcttctcactttaagttccatttctgtagtggaccctcactttgaaccctccagccatatgagctgtgagaagaggaacaaaacgaggatagtcatcagaaacaggcgaaatcagaaagcggttgagaatagaagccaccacatattccatttgaatgaaagccatttccctcccaatacacactcttggcccagcctgaaacaccggaaacttataaggattcacatacttcagaactcctttcttcacattctcctcatcaaaccatctttctggcttaaactcacaacaatccttcccccacagagcctccattctccccatcccataaggaaaatatgtcaccctatcccctttccccacgtgggtcccatctggtaacacgtcagcaccacccgcatgcttcgagtcccatgccactggcgggtataacctcatggactcacacaaacatgccttcaacaatttcatttctttcaaacactcataatccaaacccagaccctgatttttgttttctccgcaagaaacctctttcactaacgattcttcttgctctctatgcttcgataacaaccaaaacagccacgtcattgctgcggaagtggtgtccctccccgccattatcatgcttataaccatatctctcaccacgatttcctcgtgtcctgcctccagcaacctatcaagcaaatccatgccgcaatttctttcattaaacgcaattttttctttcttcgcttttataatcttcaccacggactcgtgcactagcttcactgcttccttcaatgatttctctgagccaacgttgagcattctcttcatcttccacaccagaaacaccggcgccgccccacgagcagcgctgacctccgatgcggtgtcgaacgccgtcagaagtggcggcaggggcttcgagaggtctaaacagcagggatcgtagcccagcgacaccctgcacacagtatcgaacgtgagcctcctcagcacgtcctgcaggtcgatcacgtggctctcacgtgcggcatgctccagcaatggaagaagcctttgttgagtctcttcttgaagagtcttcacgatgaagtctttgagggagcgcgtgctgaactcgtggctcgctaacttgcgctgggcgtgccacagctcgccgtcgacgttgaatatgccgcagccgagaaggtcgccgaggatttcggtgaagggtttgcctttggggaagttgccgaagttggtctttaaaatatactccacgttgccagggttcgccgtcaccaccgtgcgtcgtgcgccgaggcggcgcaccacgatggtctgtgtcggggaattggctaagtgttgggtgtaccaatccagtagacggtggcggttttggtagaatgagacgaggcatccaatgattgggtgcgaaagaggtgcatggttataattatgactaccttgttgttctgcttgtgtgatgaacaacagaaggagaaaccctaagaagggcactagaagagtgaagaagaaaatcagcatggctagttaattctcactgtttttcgaacaaactctacactgttaatgattctcagcgttggattggaatgcaagttcaatcttagtggggtatatatatagtcgaagcttattgatggaatccatggtggagtgtgtcttcgtgtaacccaagacattgaagaatggcgccgcaaattaacaaatggttgtcagagagagacaagaaagttccagcacatgattcataagtcaaaattcaggataacagtaagacaataagacaagacactctacagcctacagaaacaagtaaaaggaaaaaactactaagtaaaacaacttaaaaataattatttttgtataaaatgatgaattattttttaactaagttgaatgttgaaaccgaaatatgtaacactgatgcccatattagtaattacaacatgtcactgataaaaaaaatatatatatcactgatcaaaatataattgcaacatggtaataccaggatttttataatgtaaaagcagattgttatttatttgtattggattcataaaaatagataattatagttaatgtttaaaattattttaaattaatatgattatattattttaaaattaataattaaatatattatttttcataattaaaacaactacatttagttattattataataggtctacactttgttgtggagttttaataaatttttatgtgcttctcattatttttttggccgaattgtaattttggtcctctaattttttaaattcataattttgatttccttgatttttatttataacatttggttttctaattatataaattttttattttggtcccttgatagattattaactaataattatgattattagcgataaaaaattaattataaattaaataaaaattattaatcattaaaaaactttaataaaagactattaatcctaatgcgatgttattatcagtggagtcgcatgcgttagtggaggtcaaagatgtgtttgtgaagaagaggagaaacatgatgttgtaaaaaaatagaattaataattttttattcaactttttaataattaatgactttgattaatttataattaatttaataactcaattaatcataattatttattaataatctattagaaggaataatcaccaatttataaaactagggagactaaattttataattaaaattcaggggattaaaattatgggtttgagaaattattaagatcaaaattacaatttagcttatttcttttgctcttttataattttcaaaataaatattttcattttaattcattaatttgtttcttaaaaattggataacaagatcattattttaatacaacttgtattattggtgggggtttggacactttgtatggatcctaaattcaaacctcattattattgtacacaaaaatgctataatttgttttgataagatttaaatagatctattaaatatattaaaaataaataaaaaatattggatatataaattaaaaataaatagatttagtattgtatatttttgttttaaattttaagatgttctaacactttatttgtttttatccctaaaagtgtgttttccttccataagagaaagtaatattaattattttttttcagtaatattcttaataaatgtcatttatattttcaatataatattaaaaataaaattaattttgtattttttattatctttcatatatttattaaaaaatttatttatttaaagaaaacttagaacaatacttattatataggacaggaaataaatacaaatgagcacaaaaaatagatataaaataaacacgtggccaatagatctaaatttttttatgcacatgtagcataccgaccacttttccgactttttgttttttcttatttctttcggatatgggtggtatatccttagcttgtttgctgtgaggtgattctacttgattagtgcagctttcttgtcctttgactttagttagaccactaaaactaggaactttttcgcaaaaggaaaatccacgaacgaagagagaagcttggacggtcctcgagtaataaattatatacatatatatatatatatatatatattattttatttcatttttactctacctttcatttatttatttctttttcattgcatcacttatcatatttattatgttttctatttttttttcttcaaccgcaaattcatccaaaataaaatgaactttatatttttcacctaaagtttatacttttacggtccctaatttacaaagaatttaatgattgtgcactcattctacactatcatttaattataaattaaataaagttatcaaacttattatatataataacttatggttagatgatagtttaaaagtgatttatataatatcaatacctgatactttttcttgtttacaatttacaaatatgtctactcttaatgaataaattgttttattttattggatacgttaaaaaaataaaaatgatcgatgatttatgtaatttattacataaaatctctatataattgactatttgttttttcaggaaaagaaggtaggcattgccattctagaaccagagaatatctcagaatgttatatcaacaacttcaaaatattggtttttttttttcgatacttcaaaatattgtttttgagtcatatatgtttcatcccagataatacgtattatcgatcttcattaattatcaacttatctatataaggggctcttttaatgttgcaagtagatcagaatattcttatagctaggtattgcaaactttgagtatgtttggctgccaccaagaattaatatcaggctgcatgctattcctattgaatcaacagctggaccaattttgatcttattgccgcatgaataaccctccataggaaatgtttagttactccatatccataaaagaaaaatattcttccaaggtaaaattgtatcatatatttgacattagttaggtaatatttaaaattatctcaatattaattaataatattattagagtatcttcgataagaatttttaagtgattttcttaaattattttttttcgtgtttattataaaaaatttatacacaattttactctaatgataagaaattctaaaaaacttcaaaaaaaatcacttttatattttttattttcatttaattatgatttaattatggtgttgttatatgcaagataaatattattttttattataaaaaaagtttcttaaaatttttttatgaaaaatacaaatcttatttttagaaaattcttcctctcatatagatttactccgataaaataaattattaaaaaacaatttttcacttaaaaaatctttcaagaaaccctcatatggtttaaggatgtataattactgatcaaaaatcatgtatttattatcaaaatcatgcaatgctccgtcctaagtaacattactacatcacgagttcgtgaacagtagtcacgtctttgattataaccgttgcctattaaatgagaaaaggaaagaacattgagtggtaagcgtcaaacactgatatgatgacttttggaagcaaaactaatatctagctaatctaatgtctaaagatgacagaagaaataaaaaccatgatgaatatgtaagttgcacattaggaatgatacaattgcattggtcggtgcaaaaatctttcttcagctagctataattaaatcagttataattaaatatttttttaataatatttctagatgttgtattttatttttatttatcatatgaaaaattctctaatcaaataattatatatttttaaatatggcattataattataatatatagatatagtaatccttagctctttttactctgtttattttatggtttaaacagatttttattttttgaattactatttataatgcttaatttcttgatttatggttgcaatatttttaaaaatgttgaatattatgcaccactatcaataaaaaaacataaaatatttagagtatttaataagagcaactgattaaaataaattaaatgctgtataagaattatgaaatatcttataaaaagactattaattctttctaaagggtgctttataataaggacagaggaagtataggaggtgaaggaatacaagagcagaagctcccaggctaagataatgctcttttgccccaaaaatattatggttgcaacttttgaataccccctccgctcctttcctatataatttgttcctattttctgcatctgtatccaattttgtctcctttgtttgctgaaccaactaatatttgttgataaaaattattgtctcctttgtaggctattgtttcttgcacctctatgttgcttcctgtatctcctttatgacttctggaatgatcaatcaggaatgtaaaattacgtttttggaatgcactctttttttttacttttggaataatcaatccgaaaggtaaaaaaaacattctgaaaaggtgcaagaagcaaattgtaggtgcaggaagtaacagcctctttcgtatctaacttggtgcataaggtaagttaggggccacgactgttttttagccctcgggaataaaccagaaggggtttagaagccttaggatccacagttatgggttccaataatcatataattttaaagatataaacataaatgataagaaaataaaattgaagtatctcgagggcctatttcatttgaaaaaagtgtacacaataaagatcttctacagagtacacattaactacttatcagcaacaaacatatctgccacaacaatgcaagtttgctaatgaacaattagggggcacccagtaaagcgaaaaaaggcttaagatttaccatagatttcaatagcatccatgtaagggaaaacattaattctaaaggaaattaagaacaatatgaagtctggattcctttgcaaaccacgttcatccctatggcatcaaccatgctacaagtaaatctagctttaacactcttcaatgcaatagagcatataatactttttaagttttaagcttgacaactctacttgacttatagcaccaacaaacatcaattttctgtacaaattgaaatcacctgctaacacaattctgaaaactgcaataaattgcatcatccctcaagtggaaactcaccaaaaatcagtgcataaattcaattttttcaaataactacagtacttaaactcaccatcaacatcaacagcacctttaatccaagttaattggggtcggtggtagatgaacctaatgataaatcgaaaatgagacaaaaaataaagagaaagggagggggaaaaaagtggaaataagacaaaagagagaaacaaataagctaaaataaaagagaggtgaaaggaagaaggaagaaaagaagagagaaatgactaaaacaaggaaacaattggaacatagaactactattgggtttaaccttccaccaagtttatagcttttcttcattccatcctaagatataccgtccgccaatctatatctcactctattaggtcttgtttaactacctttctccaggtaagtttcagtcgacctctacctctttttgtgtcgagttcttggtaacaaactcctgttcttacgggagcatccagtaaccgtctcataacatgtccaaatcacctcaatctatgctctctcatcttttcacatatcggtacgactgatacatttcgtcgaatattctaatttcttttcttatccatcttcgtatatccacacatccaccttaacatcctcatttctgctacccctattttatgctcatgttgcttatgtactggccagcattccgctccatatagcattgctggtcttacagttgttttatagaattttccttttagcttaaggggaattttgcggtcacacaaaaatcctgatgcactcagccatttcatccaccctgctctaattctctgatttacatcctcatcaatctcaccacctttttgcaacattgatctcaggtatctaaaaacatctttcttgggtacctattgaccaagtagatacattgtgtggtcaccatctcttacctgtgaaaactcacacttcatatactccatcttgctcttacttatcatgaatcctttaaactccaaagtgtttctccacaattctaatttcctattaacacaatctttggtctcatcaataagcacgatatcatctacaaaaaacatacaccacgacacttcctcttgaatatctttcgttagttcattcatcactaaggaaaagagataaggactaagagctgaaccttagtgaacacctaccgtgataggaaaataccctgattttccattacaaggtttcacacatgtggtagctccatcatacatatccttgattacattaacatactttaatgatacatttttcttttcaagagtccaccataagacttctcttaggactctatcatatactttctcaagatctatgaataccatattcttcttttccctatatctttccattaattgtcttatcaagaaaataacttccatggtacatcttcctggtataaatcaaattgatttgtggaaaccttggtccccctccttaggcgatgtttgataactctctcacacaacttcatagtatgactcatgagcttgatgcctctatagtttgaacaattctggatatctctcttgtttttgtaaataggcacaaacatacttttcctccaagcatcagacatcttatttgtttgaagaatcctattaaaaaaattggtcaaccattttattgccacatctcccaagcctttctagactttaatagggacgtcatcaggtcacaaagctttattatttttcatcctctttaagacctccttaacttcatgtgtattaattctgcgcaaaaatcttctattcaaatcatcaaaaatctcacttgatgaatgaattgacgcttggttcaaacctaaatcacgcatagatggaattaaaaatccaatttaaactaatcacaacaacaattaatacagattattacaaacaaaatatcaaactaggaaatgtctagagtgccaattggagtagtaactaaaaatagcataaatatacacaataaccaagagaggggagaattggttaaacttgatcttttaaaatctttaaaacaatcagagtatttagatcatatcacaaaaacaccctttgaaatctttcagtaaatcaaatatcacctttaaagaaagcaatagctgaaattatatttttattgattctgaaaagattatccaaatgaatgacaatcaataacaacaagatgagataaaaagaaagtattaaacaccaagaaatattgtttcacttctcaacttgagaagttacatccagtttcttccaaccaacttggttagagttccactatttacaaaattcttttcttataagtttacaacaatcacccttaatcaaacctagattaagatcataaatttaactcctttagactcctagtgatcaagatatagagaatccctctatattcttccctctagagaaacctactttagacaagccttaaaaaatcttttgtaatagtaacaaacaaactaaaattctaaaacgaattacaaacaaagtttaattgagagagacaacctaataatccaaaatatatgaatgcatatgatttaccaatcttgatccagattgaatgaaaacaaatttcaaagcaaactctccaagaacttctttagaatcttgcccaagaagaaatctttcaatgtaacatgaagatttagagtttgtcggacaaggtcttagtgactcaaagtatctcttctcactttagaagattttttaaaatctatgaaaattttgttgtgtaataatctgttcatttcaaaagaccgaattgctttttatagaaaattgttataactgaatgtaatcgattaatttcacttgtgtaattgattaatatcatatttaatcgattaaagtgttcttgacctttatggaaaagatacatgagcaaagtaatcaattaattcaccatgtaatcgattaacacaagaagtcttgtttcaaaaacgtgccaagtaatcgattaccaccatctcataatcaattatcacaggaagacttgttctatgattgtggaatgtaattgattacgactcagttgtaatcgattaaagtgttcatcaaagcgtaagtaatagattatcatatactggtaattgattaaaacaatgcgaaatagttttttttcaaaacttaactaatgaacacttggctttttatgcaatcatgaaaactttaaagctttttcacaaaacatgtgcttttatgaaaaccatgaatgcaagctaatgaatgatgttcatgtaatgcaatggatcataagataaaactcttagacatctaaagattacatatgccttcaattgaatggcatgtaaaaatttaaaacttaactaagactaagagtcttagcttcttgatcctcttcaagccctccctgtatctgacagtaacatttacaaaaagtcaggttgtgccaaataactattcaatttttttatagaagctcaaagttgatttagcaaagttcatgcaattggtgttgcattgaatcgagacgagttcaaatccaaactatagtataatagtttcatgtaatgtactgagattgccaagtttatcagcatgttaatgacttcactaaaagcaagattgatccacccaccatgtatttaagcatactattcatttgattgatcaattgtcggtatctacattatacatatctttttcaccttaaaagattaaaagcagagcttcagaatcaagctcaatttgggctcctctaaaaccaataacccatgccaattaagtggacattcccaagaacccaacggtttagctactagagcattagtagccaccaatttacatgtaaaatcactgatcccaattcacccaacaaacaatagcagcaataagaatcaattttcacctaaacattctttcttcatcttttttacatcaacttttcttcttttttgtttttggctttttgcattaagtcatctaaggattccacttgaccagaaatacaactaactgtacatgcattttcatcaccactagaaacatgtacattcttatttggtgaaggggaatgctccattttttgatccattggcgcatatatgagataaactgttgtcttgtagacaattaatcttttcccaaatacaacaataacttccactttgtcaccaggctctatatttgatagtatcctttgtcactcatcatcttcaaaggagactaatgcatcttataaagttgaatggtggtctttgtgtgatttatcaccaacaaaattttcagaacatctgatcttatattgtctagggaagaataatggacatggcacatcattgttttcaagttacgtccattcacttgagggatttcaaaaatcacagaagaacctatattattgaaggttaaccaatttggataactgttaccagggagcaaacaaccttgatcactggtagtcgtattatgaaaaaaaaattaaaatatacaacttgaagtttattgaacaataccaccatgcaatcaattcaacaattagtcaacaattgataacatataacaagataataactcattttctcatcattgaaaaaattatgatcttttgattaccgaaaaattattatgaatgatgataacttgtagaaaaataaataaattgttgaaaaaatttaatgttatgcataagaatatttgcatggatgatgtaaattaagacagtttgtctaactctaaaatatcatgcgaaatgaaaaacctgtgaaagttaaagaacattttttaatttaaatttgaaatttattgtgtgaaataattataactcacattaaagtatgtatttttttaagattgtaacaagaaaaaaagttgtaattatatattcaactaccatatagtatatcatataatgtgtgaggatgtattctttgtgttcttactaaaagcaacgagttagaggtccatgttatactatgattaatttgaaaagaaaaggtttatataaaaaaaatttagaatctcaaatattgattagaagttgtttttaattattaaatatgcacatgataattgtttttttaatcaggtttttttgttgtttttttaatcaggtattgcgaaccaagagttcctttaaataatgttttggttaatgtagtttcctaagtaaacatatttcttaaacactattacacatgtaatttaagttgagttaacgactaatagaaaaaaattatgatgataatgttgaaagcatctattttgatgtatgattatttcaagtaatatgttcaagatctcctttctatatttttcaatattttataccaacttataatagtacactttcacatacaattgatatattaaaaataattttgtcaaaacaaaaggatacatttaaaaaagagtttgatgtctatatacttaccatgtaaaataattttacactattctcatttacaattgcctaaagttaagattatacttgaacctaaattcataagaaatataacactatttttaaaaaataacaagagaaaaagatagagtcatacctgtaaaatgatctgtttcagaatatgagtgacttggcaactccttcccatttcgattaaaagagatctaaaggaattttttgatcctgaaatgtgcacttgactgttgcattcaactaatgtaaaatctttcatatttggcatttgtgatgtagatgcagtcaattccaattcctcataatctgtggtacataaagcatcgatctaaaatacgttttgcatcttgagatagttgacgttatgatttgcactcaatccaaagactttgaagctttggaaagtccttagaaatagataatagataatgggaactactatttgccaaatctaaagaaacaacggatgacatacccgcaaatgtttgaacgcgggaagagaaactatttgttggtgatatccaagaccaaatgataaaaggaaacacacagtgtgtgaatccttcatagctgcacaaagaaatatatccaatgctttttgatcttactattgaaaatggtacttttgttattgcagtcttatctgcaacaagggctgttaaagactccatttgttccatgtcctctttcaacatgtcaatcattacacatccagaaagaatgagtgttttaagagatttcaacttatagatacttcttggaaggttacaaaggctaatacaatcttgcaaatttattagaagaactttatagagatgtccattggtattggaaaccttagacaattaaccttgaacaatctttgagtatcagcttttcaagattaggcaaatttaaaaagtctggggtctgtgttaaataatgagaatgtctaagattcataattttcaggttttccatcaactgcaaaaaaaaaaaaaaaaaagaaataccatagagaaaactcaaaaaataaatggaagcaattaaaatgtctcacgaatcttgcaagtaggaagcgaaatatttatatttatgtaatgtcaatatatattggttttgttttaattgtagtaagctaatggttatgtaattgcacctacatataatgattaactattcaaacttgtacagtctaaaatagtaggactacacgtggccttcaatgtgggatcactgtacacgtggacaccctccacgttcgcacagttacattaaatagtgtttattcatcttccaagtgtcaacccgaacacacgtgtttgccctccacatcagccctgctggagcgtaaaccactactagaaaaataggttttaacatcgctagtttaacatcggttattgggaaaaccgatgttaacgaaaacgcggtgacaattttgtaaataaacggacttttttaacatcagttttgaagatttttcacaaaaccgatcttaaccatgaactgttaacattggttttcaagatttttaagtataaccgatgttaaccatgaactgttaacatcggttttcaagattttaagtaaaaccgatgttaaccatgaactgttaacatcggttttcagatttttaagtaaaatcgatgttaaaataagatattaacatcggtttttttatgggaaccgatgttgtggttatcatataccacccgtcacgacgattaaacttcagtatcgcgcctttatctcttctaaaacgctacgacccttcactctcgcgcctctatctactaaaaagctctgacccttcattgtcgtcacccactgaagcgcttgtggttttccagggtttcctgcactatcgacaccatctcttctcctacgtaccttcgcatcttcttgcttcaaggttccgctgtcaccattgtcgcgcttccagtcaccggtttcgttggcattgttggtgtcttgctgaggtcgcgctcccacaaggttagtattcctctgcttccatcaatagttggtttggaatggaactgaatgatatgaaatatggtccgtgggtcattggcaccaggtgaacaccaatttcatgattttgatatgtttcgataaaagaatatgttaatgtagcttattttatatgtttaggtctctgtttaacagtatgttatgtgggttttttgtggatttgagttttctgttgttggttgtggtgaagggatcattgatgggttgtaataatgaaattttgttgttagcagtgtctgctgtaaagttgatttgttaatttctttttctcacttataaatttgttatttataagtagatatcatatatagaagcatttgatccttgtataaaagttttccttttattataagtttgttatacatagtttgatagaataatttgatccttctatgataaaagctatgggatttgaggtggttcattcaaattataatccaaacatgatttgtccacacatgcatgcatgaaacttggggcagaatgaactctctgattggatggaagaacacattagcctcttgaccaaacacgttgttgaatacttaccgaaaacaaccacctctgataacttgctttctaataacccaacaagggttgtttcccatcacaaccttagtgttccctcactagtttcacccaacttcagccaactttaggtagtgagtgaagaagtgaggttgctaggcactgttttatgaagcaggttccaatgagtgccaattcattggctcaagcacaattgatattgaacatgttttcacctggctatgggtatacccttacgcaagttgagggaactttaaggcttggatggaaggatacaagcttgtacacagcttctgcatggacctgcaataattttagctagatacaaacttgatttttttttcaaataagttctaccccaagactatttttgcctatacatggaatgtgtgtgtgtacatgtgtctgtgcgctatgtggctacctatatattaaacaggccctaaaattgtagctgatgaggaaatttgagagtgagctttgcatgataccgaagttagtagctgttttgtgtcttaaaggaaatgaggattcaataatctttgttccattggttgcgattagtggtcgattggatgagggacaaagacttgatctcagatacttaaagaaaagtagtgatcaccatttggagcttggctacaaggtactgttttaaaacaatggtaatatttttggttttctgtgaatgccttgtaatagttctttttgttgtggttttgggttgagtgtcatttgaatgatggagactttgtttgcttcaatcgtcagtctagtcttcgtaaaatgtctatcatgtggcatagaatgaaaatgacaccttattctactttttggtttaacttgtctataacttcaccataataaggcatatcgtccctatcaaaatcagcaaggtactgatttctgccttatcatgaagttacagactagttaagccgaaaagtagaataaggcatcatcttgattctatgccacatgatagacattttatgaagactaggctggcgattgaagagaacaaagtctccatcattcaaatgacgctcaacccaaaaccacaacaaaaagaactattacaaggcattcacagaaaaccaaaaatattatcattgttttaaaacagtaccttgtagccaagctccaaatggtgatcactacttttctttaagtatctgagatcaagtctttgtccctcatccaatcgaccactaatcgcaaccaatggaacaaagattatcaaatcctcatttcctttaagacacaaaacagctactaactttggtatcatgcaaaactcactctcaaatttcctcattagctacaattttagggcatgtttgatatataggcagccacatagcgcacagacacatacacacacacacacattccatgtataggcaaaaatagtcttggggtagaacttatttgaaaaaaaaatcatttattccgtatatcttttctgatatagaccatttttcttacatacttgttcctttaaacatgtaatgcataggtgttgtgatgagtttaaagttgcattaaccagataaattgcatactacatataatttcatggctatgttccctcaaacataggtaatcactattcttgttttttaattctttgcaggaagaacaaccaagtgaggttgcaaccccagattcattgttggagattgtcattgaccatcatctcaggtactgacgaatgcctttcaaatttttttagcttctatatgtaatgcgtacttgtgtaaactgttttatgccattaatgagtatttgtatatacaattaatgttcattatgagtgaaccttagtttcctgtttgagattcattacagtgattcttccggatagtttggattaatcattgtattgattcttgaattgtccgtttggacagtttgggaaggcttatatttttttagtatattcatatttatacgttgtcattcttgtcttaaatatgataaaattttgatacaatgcatttcactttgctcttcgagtgcatacttgactgtggtggaactcatgtcaccgctttcatttcgtgtacttggagaccaaagcgaaatgctgccgaaatttcgtcatatttaggataaagactcaacgtatagatatgaatatactttaaaaatatgtcttcctgaatgggatagcgccacaccttgaatgaaaaaagcgaggttttcatgcatggaatacctttgtcagtatcacataattgagttgaacatggatcaaagttggatgaatgcaagtggcatcacggttgagtacgaagaaggcattgaaaatttcttgcaatttgcctccgaaagaagtagaccggatagggatggaaaatatttctgcccctgtatcaattgtttgaatggtagacgacaaacactagaagacatatgggaccatcttctgtacgatgggattcagaagacttatacgacatggatatgacatggtgaattcacagacacgcagacggtctcgcagactgaacaggttgatgttgacatcggagatcgactagaagatatgattcgtgatctgggacatgagtcttttcagcaagcacatgcccctatgtatgatacgttggagagtgattcgaagaagccgttgtatccgaggtgcaaagactcattgacattgttgtctgcagtgttaaatcttgttaatgtcaaggctagatatggatggagtgacaaaagcttcagttcactgcttgaggtacttaaggacatgcttccagaggaaaacacgttaccaagcagttactataaggcgaagaagatactttgtccgatgggtatggagtataagaaaattcatgcctgtcctaatgactgcatattgtaccgaaatgaatttgaacaaatgcataaatgccccacgtgtggggtatcacgatacaaagtgaaggacgatgacgaatgtggcagtgatgacagttcaacgaaaggccctcccacgaaggtcttgtggtatctttcgatcattccaaggtttaagcgtctgtttgctaatgaagatgacgcaaaagaccttacatggcatgcagagggaataaactttgatgggatgctccgacatccagcagattcagttcagtagaaaaagattgatcgtttgtatccggagttcggcaaagaggcaagaaatctaaggcttgcacttgccagtgatggaatgaatccgtacggcaatttaagtactcagcacagttcgtggcctattttgctagtcatatacaacctgcctccttggttgtgcatgaagcgaaaatacatgatgttgtctatgatgatatcaggcccaaaatagccaggaaatgacattgatatttatcttagtcccttgattgaagacttggcatacttgtgggatgagggggttgtcgtgtttgatgggtatcgtaaggagacattccagttgcatgcaatgctattttgtaccattaatgattttcctgcatacgggaatttgagtggatacagtgttaagggccatcgtgcatgccctatctgtgagctagacacgagttacttgcaacttaaacatggaagaaaaatagtttacactcgccatcgacgttttttgtgaccttatcacccttatcggtgattgaaaaaagcatttaatggaagtcaagagcatgatgttgcaccgaatccgttaaccggtgagcaggttcttgagcgtgttgagggcatccatactgtatttggaaagactcaaaagaagcagaaaggtaatacatgcttatggaagaagaggtccatattgtttgagcttccatactggtctaatctagatgttagacattgtcttgatgttatgcatgtggagaaaaatgtgtgtgacaatgttatcggcacgttgcttaacattcaagggaagacaaaggatggtttaaacactcatcaagatcttgctgagatgggtatacgtgagcagttacatcctaggtccgatggtaaaaaaatttacttgcctccagcatgccacactttgtcaagaaaggagaagataagtttctgtcagtgtctacgccgagttaaagtgtcacaaggatactcttcaaatattaagagccttgtacagatgaaggattttaaactagttggattaaagtctcacgattgccacgtgttgatgcaacaactgttagccgtggcgattcgagacattttgcctaacaaagtcaggcatgctataagtcgcctgtgctttttcttcaatgtcatttgtacaaaagtcatggaccctgtaaagttagatgacttggaagaagagaccgcatttatcttgtgtcagttggagatgtactttcctccctcatttttcgacataatggttcacttacttgttcatttggtgagggaaattaaaatatgtggaccggtttatttacggtggatgtacccgatcgagcgatacatgaagatcttgaaagggtatacaaaaaacctacaccgtcctgaagcatccatagttgaaaggtacattgcagaagaagcggttgaattttgttcagagtaccttcagaaagcaaaacctattggtcttcctgagttgcgacatgaggacagagtgggaggaaagggtacacgagggctacatgttataacgccttcgttgcaggaattgtatcaagctcatttgtatgtcctgaataacagtaatgaagtgctgccatatattgttcgtcaagaagcactacttaaggaaagtaatccaagaatgacgaagaataggctgttgaaagagcataacaagactttcttgaattggtttaaacataaaatatttagtgatgaatctgcatctgaaacattgaggaagttagcagatggcccaaaaagaaatgtgagaagttggcaagggtatgatatcaacaagtactccttttataccaaacaacaagatgacaagagcaccatgcagaacaatggggttagcctaagagctgagtcacaacactttgctactgtccatgacgacaatctacttttggcgtgcttgccttactttggagtcattaatgacatatgggagcttaattatgttagtttctctgtttgtgttttcaaatgcatgtgggttgatgtcaacagtggtgtgcgaaccgaggatttaggatttactttggtagatcttaacaagctagcttatcaagacgaacctttcatcatggcagaacaagctaaacaagtcttttatgtacaagatccgtgtgacgaaaggtggtcagtggtactacaccgaaaaaccatctgcattaatgttgacgacgatgacttagccgccgatacaagtgtgactcatttctccacacaaatacctaacgtgaatagagaagacgaggttgacgatgttcatgcaaatcgtaatgatcatgatgaaggagaattaattaacatcagctaatgtaattttttttaactacttttgacttgtacgtactatttcatatgtaacataacttttcacttacctttacttatgtgtgttcttgttttttacaggatcatgactacaccacccagctcccctcctcgtgctgagtcaccacttcctcctcctgagtcagcacctcctcttgagccaacaccttcgtcgcctacatcgaagaagacgaggaaagcaacacgactgaggtcactggctactagagctcctggtgctgaaagaccggtggtccatgtggatcctagcacagggaaggctgatggtcctcaggcaaaaagattgaggacatatcttggggtcgtggccagagacaaggtggatatcacccttcctaattggaaggaagtgccttcagtgcagaaggacttgatttgggaggacattcaggtattacaatttaaagcattacacaaataaattgttgttcatgtgacttgaaaagtaagttccttttgatgcaggttgaatttgatatacctgaagcgtcagaccaacggacaaagaagattctgcaaactgtgggcgagcgctggaggcaattcaaatcggacttgacaaggaaatgggtcgacgctgtatgcgaaaaatatggcatcagtcacgaacagtggacctaattctgtcagagtaggcgagcagcttcctgggaggttagttattttacataacccgtcaaattttgaattatgtagttatacaatctcctatttggtaaccctatgtgtctacctattacagcatgtgagaaagaaggcccaggcaatccagaagcaaaacaccgcccctcacgtattgtcacgtgggggttacgagttgctcgagagagattgatggaggaaaaacaaaagaagcagctggagggagcaactcatgatgacagcacggagatcatcattcatcctccgtcccctgtgcgacgacaggtgaagtggaagttggctcgcacaaagaaaagcggcgacatgacttcggaggcggcacgccagattgctgaaaggattataagtaaaacaacaatgtcatacacatttaattaattttcgtatcacaagtaacaaaacaaatggtctacttattttgattgcaggattccctagaagagcaatccacccagggttcttttgtcgccagtggtcgtcaggatgtcctagctgctgccattggacaactggagcatcctggccatgtccgtggtgctggagctggtgtgaccatcacccagtacttcggaccggctccatcatcctctcgcaagttgaaggcttcatccatggcgcctgaagacttggatcgcctgaaagacaacatcagggtcgagctggagcaatctatcactggtcgacttacacagtcgatcactgaaagagttacccaacaggtgatgatgagcttcagccagctgcagtcccacatccagtctcaggctgccattcagcctccggaggttcaatcatgtcctcttggtgcccgtgtcagcactaagggaagttgtgtcgatccctcgagcagtgagccagacacgagtgcatctgacaggcgtgggttgtatgtggatggcaattatccccgccttgttgcccttggcagagttcatgagggatcgacgactgtgcacaatgtccctcttgccgctgatcaggtaaaggtaagtgttgaggaggtacgcgatgcagaggctttcgtccctgttcccactgacgaggttcagttagtggggcagacacttaacactttccttgcttggccgacacatcttgtacgcacaattttgacttaggtttttgatttttcccttatgtcttctaatttacgaatgatttgtcacatatcaagttaaccttatcgctcacccttggttgttaactgtgtaggataaagaagaacccaagggaccggcgaaacttgtacataagccggaacatgtttctgatcccttgtaccatttagcattgaccatccccgatcttttcctcagacccttccaggtgccatgggactcgcagatgttcggggtgaataatgacaacttcctgttgtacatcaagcatgaggatatttcggagatcatccatggtggtcaatgtctcaacatctccgttatacaattgtggatgttgtaagtctcttgcaattgacgagcattacttggtgagtagttttatattctaccataacttactttattttcattgcacaataggcatatgaatcatttaagtctgcaatcagatcatcccgatgtgtatggattcctcgagccacagtccatacagagatctggccaatctcaatttcagatcgaggactatatgaagaaatggatgcagacttcacagaaaaaagtctaccttgcaccgtatttgaatgggtaagtataaatgagaatcacaatttaattaatgtatgcagtataataaccttgtttttgacaatgcagttcacattggcaactggtagttatatgtctggaggccaatgtagttgcctgtttctgtttgttgcataacagacttgataactaccttaaaggaattattaacaggtaggttctaatttctaacacatttacgttatttctacagttgaaaggtaacttgtagactatgcatacttgtttgtcttaaacagtgctttgaagggagtggatgactctccagcaaataaatcaaaggctacaactaaatggattgtgcttaaagtaagtctcttcataaatcatggtttaagtattgaattaatttttattaatatttacggtaattgccatttaactttgaccgtgtttttcaatttagtgtaataagcaaacaggaagcactgagtatggctattatgtcatgcattggatgcagacaatagtccaaggaggcttcacagatagctgggacatggtaattagttgtctaattcaaaacaaattatttttgtttacttgtttttgttttgtacttattacatgttttcttgtgtcatgcagttttcactgatcaaagaccattggaagccaatgggggaaattttttcttcaaattagagaagatgtattagtagattaggtggtttattggattttcaaaacaattgtatatattaatgcttagcatattcttttatgtacactgacaatatttacattggatttgttattggaatattattaaattgtggattggttggatctggatttttaaattttcaggttgaagaactgctaaaattaaaaaaacagataaaatatttaaaaaaaaaacataaaaaacaacatcggttgcaacaaaaactgatgttaacatataaatcaacatcggttttctttccaaaaccgatgttgattatggataagaacatcggttttccaatgaaaatcgatgttgttgtgatgtaacaacattggttttggaaataaaaccgatgttgttttaatgtaacaacatcggttttatttcaaaaatcaatgttgttacatcacaacaacatcggttttcattggaaaaccaatgttcttatccataatcaacatcggtttttcataaaagttgatgttgttgtccttttttaacatcggttttgcatggaacccgatcggttttgcatggaacccgatgttgtcgcaccatcttttacgcttttcaacgttttcatttatcacatgtccacatcggttattcatggcaaaccgatgttctttacttttgttaacatcggttttgagaaccgatgttaacttcaacactttcaacgtcgcctgattcaacatcgggtcagaaccgatgttaaatgtctcaaataaccgatgtagaaagctgtttttctagtagtgaacgtcaacatgctacaggagcacaaacgtctacaatatttatctccttattaaccgcatatcaactatgcttggatattcaaataggtgtaaccaccttatcatatcatatcttcccaagttatctacaagctgttacttatctacaagtaattgtatatcaataaggtacacattatcttatatttaaattacataactgcatgctattatctattattatcttatcaacagattactaacaaacaaaggctcaaaacccatactccacactataaatacaccttacaggttctttctaactcactccaattcttgaatgcattacttaagttattcattctctagatctcatactgagttcccacacttagttattcttcaataattgatgtatttacttgagcgtcagagtgtttttcctttgttttgcaggttcctcctctaaacaaagcctactcatcatccgacgtgcagaatttggagttcacattggctaagcctacctaacacgtgaaatttccagattttggtaagaacaaaactgattctttttacaggacacattttcttgagatcccttgatattggacatatcaagaggacatttgaacatagtgacacaaacgtccttctgacatgctcactatgaggaaaaagggaacaagttcttgcctactagaatggtcttcttgcctattgggatggtcaagactttaagaagggatattttcaacagtcaaactatgttacaattatattcagtgtgtcgaatccatgtttcagtgatatcatgcagcaagttgatgtcagtcagtagcagcatgcaacaaatttgacagattcataccatagtactctctacactaaaacacttgtggatcttaaataaaaaattggcacctaattaagtgtttgacactacggagctctaatgtagtagtgacaaactcactgtcactgacccaattaattttaatttgtttagtacatgtattgtactctatgtttcagttttggggtggagttaggagaatagccacctgtttattatcctgtgttgacttggtggttaattctaggtgagcattccttatgcttgaccttagcttcaataaaactttttggctatttaaattttaaaacatgtttggccttcatcaaggcctcattcatctcacggtttgcagccatttctcgctgcataatcttctgcatctgcctattagcagccaactcatgctgcatggttgccaacgcagtcgccacttgatcaggctgggcattcgtcacccactgttgttctgggatctcgtcatgacactgcacatgtacaccaacacagtgagttgatcaggcccacaattagtgtccacacatgcaatagccatggcaaactcagaaaacagtcaagagcaacacacaatcaccatacataatgcttctatcaagaaactgctctgataccataaatgtaacaccccttatgcatccggtgtattaacaattacttaatcaaattaacgcggtaattaatttaaaaaccaacaaataaaacaacgtaagcattttttttctcaaaacatatttcctaattcattatgtatggtacgtaacctcaaagcataaacgaataccacaaaccacaactagccttttcgatccagacaacataaagaacaacagatacatccacaatatctatatagatatatcaggagaataaaccacgggtataaacatatatacatcatctcaacaaccactgtggcaatacaaaagaataggcatccattgccatgatctcaccgatcacatcctcacacgagggcatacaaaacatgtattgtctatacaacataaacataaacagagtccaacatatgtgtacacacacatcttccctcgcaggggtacaaaaatacatcaaaacaaaagaatgagccacaattgtttcctcacactgccaagtagctgcacaaagtttgtctctactaggacctcccgccctgagacctatcatctctgccagatgaatcacctacaaaatataattcccacacgggttgagatacaatctcaataagctcagggcccttggaggcttctcctcccccctggctcacttccatgatacaaaacatcaaaggcatcacaatcaattggccacctggtccccacaacaatacatagtcatcatctagttctaatgtatatctgcggtactacgctcgccacaagatgcatcatcatcagcatctggaactctcagtccccagtgtgagatcgaaactcacacccgtgtcatcccatcggaagttatccctttacacatggatgcacatatatggcacctctgagaataggcttcaaccgcgacgggaccacctatctcttggtcttaaaggagttgcgctctactcctagggaggttcatatctatctaactagccagaagatctattcaacaggtaaccatccacataaatcatagaatcatgcatacatatcatcattagacaactgtaacaaccaattcaatgcacatgcatcatgtatgcaaccatcactcccctggagtatggtggaacacaggcagtgagaaacattccccaagagtgaagagcttacctagcaacgcagtgctctactgcttaatcccagcacggtggtctacgccactgacaccctcaatgtcacgccctataccaaggcacacaaacaacatcaacaacgattctcaatcgttagaaagacaagaacgttattctatttcatttaaaaatctccaagtcctctatcttaaggtaatcaaagctaaccatctaatcgtcaactcacagaccctaaacgggtctatctaggcctaaccaaggcaatagagtctccccaagactaggtataagtcaattcaaagagctcaaagctccatacaagccaaaactcaaggattaacaatatggctaaaacgattacttcaacacaaattcaccgtttatatagcctcctgagcacatattatacaagtatctaggctcatgcatgtcctacaataaccaatataaccaacattcttcctacacatgcttttctcagagccaaaaaccaaagtccattaatcaatatttaaaagctaatccttcatcacaacacccttctaagcatactattttaaaggacccaagcctaataccagctgtaacttgagtttcttacctctaaacaatcaaggaatactagaggatcacttctccaagcgtgggtgtccgcaaatcacctccgttccccgttaaactcaaattttgtgaagttccctagagaatgcgatctgtccgtttgaaggtttttagggaaaagtgatgaaggattctagctcacagggtgatttcctacaagtttcatgttggaagctaaaggtttaggtcaaggaatgaaggattatgaagcttggccctttcaacaatggtggaaagcgctcgaaggaagaaaaagtggagtttttggccagaaatcgcctaaatggccttttatagtggtcctgtcagagttcccgcgctgatcgcaccaaatctggcactattggcgccacttccatgcatctctgacgctactggcgccaactcccacacgagtagcaccagatgctaaaaaaaaggccaaaggttcaaactccccacgctgatcgcgtggcccttgacgccactaggcccaccagttcgaatccagagaccatatttacaatcttggcgctaaccgcgtggctttccacgctaacagcaccaacctatcgtatgtctggcactaaccgcgccacttcccacactaacggtgccatcaattttttttttttagaaaaacatggttattataggaagcatatggagtggttttgttacctaaagccttggtccaaataatacccaccaagcttcaagcactgatatgtatttattccacgcatcaatttgttcattattcattatgcaccaacaaattaaaaaattaaacagtgcaacttggtcagtgattgcaaaattagcctaggctacacatatattctaatattagcataggctaagtcaagctaaaaaaagtgtaggctaagctgatgctaattagtgtcagtcaaaatagaaaacaccatacagatggactcattttagtgtctaataagcattagcttaaacacaacattgatgtcactactacaagcaagcccttctaagtcggttctaaagaccattcaaagacaagtctccactcgtattagttgctaacgtctttgaaagtttgaattttgaagtcggttatgagaccgccttggtatttgcgattctaagacggttatatgtatgaaccgtcttagaagggtcgctttctaagacgattgtacagataaccgtcttagatttgatgaatattttttaggccttctaagacggttattcacataaacgtcttagaataatgactttctaagacgggtttaaccaacaaccgtctttaatttattgcacaggccaactaagacgattatatacagaaccgtcttagaatgttagatttcaaagatggatttatccaacaaccatgtttgatttattgttttatttttttataatcattctaagacggttgtatcttataaccatcttagatttattgttttttttaattgctttattttatggttttcctaattttttttgttcaaaattaaaatatcaattactaattgaaacacacaatctgaataatattaataatatatataccacatttagttaaatgcatgttctattaatggaacgaaataacaacttacatttgctttttctttcgattataacattcataatttgcaagtatcaaagaaaaaataaaacaagcacttaacatattcatcttctatgatcaaaacataaataaaataaagaattacaaacatacaaatcacttaatcttgtcaagccagaaatgctagaagtttgttataattaaattcctatgaagacattttgtctagtaaagaagaaaatgttgagtggctttccttcatgaactgatttggtcaaggctaataggcacaactcaaattccttcatcactcatcacttgatcagtaaatttaagaaaaatacaattgctgcaagggacaaggatgtgtttgggatcatccttgaatctcaagtttgggatcctttgtcaacacaaacaaacatattagctaggaagggaagaagaaatatccaagtttgatagattaagacaatgttctttctaagaaagatagataacttttcaaagtaaatctattaaataagaacttttaacaaatcaaatatcttcaatgatagtgcattattcatacagtcagagaggggaagggcaaagagagagcaataccttctttggatgaaacttaagataaatatttaagactttaatcaatctacttggatttctctgttgaagacaaaaatatatacaaagatgatcagagattatcatgaagcaatatttcaaagaaacttccaagaatagccaaatagacaaattgagatgaataccggtcctcccgggaatatacataacctaattaacactgtagcaatggtactaaggaaaatataggtatttaattatatatgtatacacaccatacataatcaactttggcccgatttgatttttttttttcaataaacacttacaagaaataaaataaaaaggttttaaagaagttaaatgaaataagttttacaaattagcttatgtatcaaataattcaacttataagagaaacttatttcattttatgttattttcttactttctttccttaagaagtttttctatacaaaggacctagagtttaccatatgaccatagttggtaacattcagagtgcatatgattctgacagagtttatgcatcttctagagctgtctgcaatttagtagtgggaagttccattttctcagttggagtagaaccatttccagccattaacatgatagccttggcctaatggtcatgtaaagtaaaaatcagaaaactaaaaatataaatattgaatgcaaaagctttgatacccattgccttaaggacaccagttaagaaatcaataaatagaaaatatgtagtaaaaattacccagataatgtgggaacaacagctccaacgtcccttagtagtaaaaattattttatatagttaactgttaataattatttttttttcttgtctttaaatcatgtgtgtttgaattttaaatgaaattaattagtttaaacattagaaatgtggtttaataaaaatgcccatatatatatatatatatataaatttaataatttattgcttagtggaaaaaccatttcacgggaacttacattagtatcaatactatataattgacaaattaacattggctttaacacactttatctagctaggatgatgcaattcccaaaataatgataaccttcacgttgatagggattttcattgatatgtttaaccgtatggattttcattgatatgtacatgagaatatgttgcaccggcaaaataaaaacagattttgatgagttgtgtgtggtctatattagcataaagttttcacattaacaactgaaccattaacatatgtttattttattggttcttatacttttaaacgtgtggattttggttcttgtattttgcaagtttattttattcaaagtttcactctataaaatatatcaaatattagtgcaaatgattatattctctatcaagggatttaattctgttggttgagcagtgttagttattgtaaaccttgatattattttcaatttttatggaaaaaaataataattatatcatgtaactctttaagatgtattttggtacattatagaaaatagggactaaaaaaaaaaatcttatctattttggtcttcgtaatttttttctttagacttggtagacaaatttaatagcagagatcaaaatctagcaatttttttaaggggaccaaaatgaaaataaaaactcaaagacaaaaattaaagaatttttattttatatggatgaaaaggttagttaagtcattatttaattcacaagccaacccagttagtttaattgagatgaagacagaaagaagggttctgaatttgaagcatagaaagagactagatagctctggtaatctagagacattttggttcatgcaaactaccatgtaatgtggagatgacatgaaattgcaggaggaagaaactcaaggaagtataaaggactggaacaatttattctataaagtatttaatgaatttattctatgaactataaaggaatagaataaaaaaaatcagtagcttgtcattacatatcagtccataaagggattaatcataccttgtgtcctgtataaaactgcatggttaagactagtcttgttgccaagtcctgcatgcataatttgatgacaagttagtaagtacagaaaaatactagtcttgttctctcctccttgtctcagaagagtaacttataagtgctacaatatttaaaaaataaaaaaaaatgattgtgattagcaggataaaataaaatcaggactaactagagctagcaactagaaaaaaaatgattggtcagacttcccagagttagcaactctagagcgattgtgatcgtattttctcaaaacgcaaattaggttttaggtgatgaaaacggtgtcgtcgtcgcgcatcacgaaccaccgtacgtccttcatcccaagccgcagcgtctccgacatgatccgcgagatcctaatcgccgaccagtgcccttgcctattcgtgtacttgaacctcaccgtgtcgtcggagatctagtcatgacattcacagatctggtctaatagtcatagatctgaaccagagcaacgaggagggaggcgaagagtgagaggcctctcttgggcgacttctcttgagcggcctcatgttctcgttcttttgtttcaacgccacgaggtgaatgaattaagtttttaaaaaaaattaaacctcatataagagagaaagggaacaggaaatgaaacgtccaggtacaacgaatttcaaagacggttttaaaaacctgtctataaacatttgcttttaaaatcggtttttccacaaccgtctttataacttgcaaactcgtgctttcagattcagttttcatggacccgtctttgtttatttctttttagttataaatttgtcaccgcacaagattctaagacggttttaaaacaattgtcttagatttgatgtcgtaaaatgttatttttgtagtaatgtgtttagggtttaggatccactatttcagttatagataaaaaaaaaattcacattgatagtgactcagttttaaacacttttttcctaaagactaaacttttggtaaagctctatcggaagtacttgcaatgtaagagacttaaaaaacgtagatgaacagtctaaaagtactaaacaataaaatagtgttaatatttgaacaatttaaattgtaataaggacaactaataagaggagtgaaaacaattaactcatgaaatgcaaaagactaaattaatacttgggcttccttccacacaagtttaacattactgttttctagttcaatggaaacaagactttcttgataaaaatttgttggtatgcatgctaaaggaaatccatgccaacaaagccatctaagatctctggaaagatatttaaaatccccaacaagctgtacactagcaagttgaagcaacttcagtttcttcatcttcttaaaagctttagtactcaaacattttgtattagttctttgtaacttcaaagccagcccctcaatagcttttgttccctatgaaataaagtggacaaaagggtaaaagtaagcatagcataaaggtatatgctaacttaggctctcatgaagaaattcatcatttgattttttttgtaacaattcatcatttgatgctaagatctgggaaatagaaaacaattaacatccaaactaacttttaaagttcttgtggcaatcaatcatataaatgaacattaacgattgactcataaatgtgttttatgcatcctttgactttagatattttaaatttaaaaacaacaaatcaaggtcttaccatttcttttgataaaacatcaagcacattctcatgaagccataatctactacacttctcaagcttctttggtgattttgaacgaatgatttctcttcccatgtctcgtacgtaacaaatcatgcattccaagtttgttcttatcatccacagttatgagacttcgctctacgtacaaggacacgtattccattttctacgaaaagtccacaaccatttaatctgattatgacatcatttttgtccattccaataaagaaacaagctatgtcaaggaatatttctccctctgtatcatcacttaacccatcatagcttatttttaacttcttatgtatttgatcataggaattgtctttagtctctccaatacactttcccactttgttacttccatatcaaattgttcttaccaaaatctgtaaattccacttgtgggcttgatgtggccttggtggactccaaattctgcggcaccaaagtaagggtaggctttgcttagaggatggacctgcaaaacaaaagaaaaacactctgacgcccaagtaagtacattaaatttgtaaggatgaccaagtgtgaagactcggcctaaagtatagagaatgagagacttgagtaatgattttaagtgtatatgagagagaggtattctgtgtgaataccgaatgagtatggtgtatgtgtgttgagtgtggatgatgtgtgtagagagaacctagagggttgtatttatagcgtggagtgggtcttgggccattgcttatagataatctgttgagaagataataataacagataatagcatgcagttatcttaatttgaataagagataatgtgtaccttattgatatattgttacttgtagataagtaacaattagtagataacttgttgagatattatatgataagataaggtgattacacctatttgaatatcctggaatatagataggcaattaataaggagagaatattgctgatgttcgcgctcttgtagagggtcgacgtccgtgctcctatagcggtgttgacaaggaacctagacattgtgtctgggctggcatctggagattgaataagcgtctattaatgaggcgatgctgacatggaggatggtcacgtatacattgacatttatgaagtggccacgtgtcattttactattttggaccgtacgcaaacaaataacacccaagcacttgaagggctaatggcaatcccccggaatatgcaactacatttctagaaagctcaatgaactcttctctaggacttgcttccttgaatgcgtgccaactaaaaagctcaatagattcactttcatccattcctttgattatgtgtactttgtcaactctatttcctctaattatatgcttatctctggtggtgatgattattctactccctgaaccaaaccattcacgacttccacacaaagcattcaattgatctaattcattcacatcatcaagtacaagaagtactcgtttttggcgaagtctttcctttagtatagtttttcatgattcaacattacggatctttgtttttgtttctttatagatatccgatagaagttgttcttgtaaattgactcggccaacatcttgcccccaaacttccctaatacatgatggcttttgcaatggttgttttaccaatgcctcccataccccatatccctagcagtagaacatcatttgatagtttgtgctctagcagctgaatcatatcttgaactcgtgattctactcccactggattatcagcaacaaacaaatttgccttgtctaagaaacgtgtaacattttcaacaatgtttttgatagcctcactttcattcctattaaaaaaaaaataaaccaaagaaaagttgtatacatatatgtatcaaaattagagggaaatatgagtgaaaaaaattatagttgggcagaagtttgttcctccattgggttcttgcaaggtgcattgctcggtactaactatcatgtctcaaacttttatatgacaaatagatagtgtttttgcttaactgttgaatttaaaagtgcacctcatccagttcaattatgaactgcagggggcaatttcaggtagggtttagtgttttaaatgaaacgaactgattgtcaaaacacttttgacccatcaaatccaagcaaaacaacttttcaaaggttgaaacccacctgaacaaactaaccaaaaaatctcaatattttttatatttgtcatttcctatactcttaaatgtttaacgtgtcgatttaattggttagcagcaatttaaatgtgcaattttgacgctattgtacataaaaatatgatgtcttaagaaatgatgagtatttgatgaaaaaatatgacaatgcaggaagtgtgaaattaccttgaattcaggactacaacccgccagcagcctcacgaagtgcctccctccaacccagcacgtcttctttctcacttaaaatccttcttaaaacatattcaacttcatcctcatcaaccgcattgttcgaaagcagcgccacctcgtctttcttttttaaaagcctgttcaaaagattttgaaatgccttaccaaactcaccactttgatgtcgtacttcagagggatcaacatcatagaacactggcactaccacctgccctatggttctctgacagtccattattctcgatcttcaactctttcatacaccatcgtgactctgcataatttcttgagaatacaacaacagaaattcgagactgctcgattgcttgcagcagtgagggtgaaatgtcatatcccattttaaatgactcgtcatccttgaaaacattgactccggcattttgaagagaggcatagagatgtaaagtaaaagaagcacgtgtgtctttccctctgaaactcaaaaacacttcatactttctgtggaaaataacgtatcacacaggattcagcaactgcagtcttaattgattacatgaagagtactcattaactccattccattaaacacaaaattttaatgtgaattattttgccgcagaataactagaaaagtaagattatctccagaatcaaaaagggtgaaattcgttgaaggtgcttgagtgagtgatcaatatatgcattactaaattcgtggaagatcttagtgttttattttcagttttatagatattagatagcctatacttgattaacaaattagttagacggttagagaattagttttacttctacagtgcggtaaacaagtatataaaagactttttgtaactttgtttgattgatcaatatagaataagttttcattttttcttgagcttccaagagaagtttctctctcgctcatggtttgaaccttcatcgttcagatttccatagatttgtacatggtatcaaagccatgaatacatcacgagacctgaatcgtaattgctaccattaagaagcatagaaaccagtggaattcctggattttcttgcagatgaatgaagaaattaaaggattggtaggatcgagaagtggattggccattgatttcagaagcaacgattttagtgccgctgagctgaagtcaggattatatcaaatatgttgttttcttacaattgtagatgattacagcagacatacttggttgtacttaatgaaaagtaaatcagaggtttcagttcttattaggaattttagttctctagttgaaacacaatttcttggtaaaaccaaatgtattagatcgtggatgatttttacaaatgaaagggtatttttcaccgaacttcttgtgtcaaaataccataacaaaatggtgttgtgaaagaaaacaccaacatattttgtcagttgctcggctcttatttttcaagctcaacttcctaagattttttgaagctttgccattacacatgaagtgtacttaataaatagacaaccttcttcatatctatctaacaagtcacatgatgaagttttatactcacagcatcctgatatctctgacttgaaatcttttagttgtttatgttttgctggtaaacttccttctaaaaggaagaaactggatcctaagccagaaaatgtatttttcttggatataaatctggcacaaaagggtatgtcttgtttggttttaaaaaattgggaaatatccaagcttggactgttggatattcacattccagcttgaggggtgatgttagtgttatattttcagttttatagatagtctatacttgattagcaaattagttagatggttagagaatcagttttacttctacagtgcagtaaacaagtatataaaatcccttttgtatctatgtttgattggtcaatatagatagaatcagttttcctttttttctcgagctttcaagagaagtttctctcttgctcatggcgttagccttcttggttcagattcacatagatttctacagaagcagaaaagaggtgggagcagcatacctaggaaagattccatggagggaagctctgtctctggtgttaattggcactgcctgacgatccaagctctggtagaccatcaaggttcataaatccaagccttggtagacctccaactcaaaaactcaggaccaattcttcatactttctaaaggttcgcaaaaccctagggcttccctaggtggacctctagcaaaaccaaagctaggcagccccttggtcaataacaggtttataaacccaagctctggtaggccgccaaggttcataaactcaagctctggtagaccgccaaggttcataaacccaagtcttggtaaacctccaaactccaaaatccagagcggacgtgtcactggtcggtctccaatggttcgctaaacccaaggtctacccttggtaaatgttgtgcgattacgcgaatatatacggcaagtgcactgatcgttaacaagtaataaaagtgagtaagtgagttatcgtctccacagggattggggtaattttcacaataaaattaattctaaatgattggaaataaaaatagaaaacaaagaatagttgttgattggatgattgtttgaataaagacagaaattaaatgtaataaaatagtaagaaaatttaccaatggaagaaacaattgtggtcaggcacaatcccttttgttcctacctccttcacttgattggtttattatattaagtcacacacatgataaatctttcctaaattcgtaaatcctagaactactagagtcataaccagcaatttaaccctttaattcgatcaagaaacctaaacccttagtgaatctgtcaaactaagtattcaaagaatatatctcatgtgatcttgttaagattattcggagaataagtctttcctaagttagttaatccctaatgtcttagtgaatcaaccctttaacctaattcaaaaacccaatttcttggtgaattctattaagttaagcatgaaaaagaacatattataaaatccgtagccatgcatccctatgtctaggcgaagaacaactattattctaaacatgtcagaaattagaaccccaacgttcccattgcgaatcctaaccctcaatacttaaatagaatggccaattccaaataagagtaaaacattgaatagcacagagtagaataaaataatcaaaacagcattaaaaccaataccaaatcaagttgcagaggagttacatcagttcatggcctttccataatacaagttcagcctaccataggcttcaagaaaccaaagactgtcaaataatacattcttggtgaccttgccttgattcttgacttccaatggtgaaaatatgagaaagagagagtggaatggatgataagaggtgttggtggattgtcagagattttatattttggatgcttcctagaggcctttatttatagataaatctaattagggtaacaaggcctattttcttgttccaaatctgaatcaaatcttcttaattaaggaaactaaatatatttatagaatcctttaattaaggcaactaatcctaatatagcaccaaatctgaaaatatataatttaaataaggaaacaatttcaacctcacgcgacccgcgcgcgatctcgcgctagtcgcgtggaatggccgaaagaatggcgcttgtcgcgtgggacatggcgcttgtcgcgcggcttggcagaagagaatacccttaatccttgaggtactggcgcgtctcgcgtgataatggcgctacaagcgtggtactctcgggtcctccacgctggtcgcgtggattccacgcttgtcgcgtggtgtcttccagtgattgttcttcaactctgcacttgatgcgactcgcgtgacactcccgcgcgggtcgcgcgggactccagtacttgttttcttctttctttggcctttattctcctcttttgtcctgaaaatgcataattggtattggaatgagataaaataaaatattattaataaactaactaaaactaattatttaatcaaaatataacctaaaactatcctaaactaagatgtgtttgcaacacatcagtaaacctcctcattgctaagtttcctaggcaaaaactcaaggtacacaaggtctatccttgacacattttaccattcctaagctttattcttgtgtgagtataagttggcaagagcacagaacccaaagtccgtccttggtatgcaaaatccaaggttcatccttagcatacataatccaaggtccacccttggtgcacaaaatccaaaactggctcttgataacttacaggttcaacaaatccaaggtcaacccttggtgaacttccaacaaaaattcaggatggacaattctcctggtacaaggttagacaaacccaaggtccacccttagtcagtcttgacaaaacctaggatggacagctcttctagtatcatacttgacaaactcaaagaacaggtgtcaaaggtccacccttgacactccaaacccaagacacactcttggtactctcactcctatggaacctcaacatgcaggaccataagattatttgttttgcaggaacaagtgtctagggtccaccttgacactccaaacccaagacgcacttttggtacattcactcacttggaacctcgacaagcaatgctacagacttagccaattgcaaaagcaggagtccaacacatacatccaaggatcacctttgacactcgaaacccaagagacaatcttggtaattcagcgagacactattagattgcaaggtctcccttctatgatgaaaggacgccattcaagcagcctattctcatcatcacaagaaattcataaataggagataacaacatacaaaagaaaatgcagaagattgaaggcaaagaaaggagagcatttgcattaagacaattgttaacacttaacatggcctccacggccaaaagttaaaacaaaaatacaaagataggtggcagcctagacactgtcccgtcatctggctcctcgacggaagcgatttcctcttcatcaagcaggacaccgccctttacatcgttgaataggtcaaagacacttaagtcaaggtctttagcaaagaagttggcctgactgacggccttgagaaagcccttttctcatactgttcaatcgcctcacgtttgaaaagggccagctcatcttcaaactctttgtgggcagccttctcctcaaccaacctagcctccaagtcagtcactttcttggcaagctcatccctcacgacgacagccctgtcagcattggcagccaactctttcttctcccccagcagcaacagacgccaccactgaagtcgtaacccagacaatggatggtgaaacagatgaacagggaagctactcagcggcctccctcattttacgcagactgcgaggggcccttgacttcttgtgctcaaacatcccaacaccatcaccccttttactcttagtcaaaatagagggggaaatgctgggaaaagcagcaggaacatcagtaaggccaatctcgacatcgggtcaaccctcttctccagccgtaggatgacttgggcaggtggcacaacatcaccatctgcacccacattcttcactaactgcctccatgcgaagttacctattatacctgcaaagcacacagagaaatcataagtgtcaagccaagtcaaaatacacacaagaagaaaagcaaggatgcaagaacattcaagaagataggtatggcggtgagaaaagttgtcaaacgtccattttcagttatgcacgagagttgaaacgactccctcgaaatccgcaccatgacctgacgccacttacccattactgcacgtctctagtacgtgtccactctttgagtgacaggtacgcacgagtacaacgcgtgggcgacacatacctgcatcataagacaaagcgtaatgctcgttctcaatgctcaacccaacgatcagatattgacagaaggttcaaccttgactcttcactttcttgacatgtccgacctcatctacatatcaaattagtccaccttggacagctcagcaataacaacccggacaaccttgtctagattcaagacattacttaacaaagctatcgacctcgatgcacgacatcacttgtctactctcgggggctaatagtactcatcatattgtttgccatgacactggacatccttcatcaacgcttattcatcctctttcgactacaaatcagcttagaggctgaggtgcttatatacagtccaaaatggtaaactgacacatggccatcattgaaaggtcattatacacgtggacaccctccacgtcaacattactacattaataatgatttttaattctccaagtgtcaattcggacacacttgtccaccctccttgtcagccttgctacagtagtgcagacgtcgaccttttataggagcaacgacgcttacaatgcatatctccttattaacaacatatcaactatgcctagttatttaaacaagtgtaaccaccttatcaccaaatatctctataagttatctacaagttgttacttatccacaagtaacagtatatcaataaggtacacaatattttctatttaaattagataactgtctaatattatctgttattatcttatcaacaaatcactaacaaacaaaggctcaaagtccacactccacactataaatacaggttctctctaaacctttacgaagtcattactcagaggacgatcccctcattattcatcattgttcacccacagtggacatccctccgagacactcttggaagcctttatacactttcacatacttagttattctcatataatttatgtacttacatgagcgtcggagtgtctttcctttgttttgcaggtcccttccctaaacaaggttgactcatcatccgacgtgcagaatttgtaacccacttggagcccgtctagctcatatgtgaaatttccagattttggttagaacatgctagttctcttttgtaaacacgttattactatttttttataatgaaagtaaaataagcaaaagacaagtaactaccaatcaaagaatatgttattatgctcatttgagtttttgagttttatcacccataataatcttactcacatgaacaaattacttctggtacaaaaatatgtagaaaaggaaaaaaaaggtcaccaaacaaccaagaatgtcaaaattgtaattatataattggttcttaattatattttaaggttcaatttaatcccttaattattaaaaggtttaatttgatccttcaattatttcaaagatacaatcatgtcctttctgtacgtcaattttgatacattgactaacattgactatcttcaccctctttctctaacccttcatccatcaaatctcatgccaccacacccacaatcccaccaacctctagcttgacaccatcactccatcgcgtatgtcaccatcgttcaacaacaaacccagatctgcacccaccatgcgagtggagtgaaaacaaagagcctacacctatcattcgacgtgctagggttttaggaattgttaatttcaaaatttttcaaatcaaacttttgatgatttacaaaattggttgagggcttttatagattgttgaatttcgaataaaacccatccaagaacattaattttcattcacaaaattgaaggtatttacgaaaaacaaattgatatggggcatggttagtgtgaaaactggatgtaaatacaaacaaagtcttgtacattagttgttgtactaatcaatttaagaaatataatgttttatttcaaatgtgtttataatcaatgtaaaagtgttgattttcatcaattaaattaatcaatctaacaaaaagagtataattgtttcattttaaactattgagaaatcaaatttaacattttaataatttaaaagtatcaaattaaaccttaaaataagaccaattgaatcgatttaaaaagcacacaagtagcttattattcactagagcaaagacaaactcccaattagtaaccatatccgtttactctaattacaaaaccaccctcacccctcgtaccgttaacaccagataacacacagtgaaacgagcggttcaaaatcaaaacttccatttcgcagacaccaagttcacttctgatgaaaaaatgatttccctgaaagccattaacgcgtcctccttcactctccaccacaacaacgcaagattccctcacacaagagcttcttcttctgttctgtgcttttgcagcaagtataacaacaacgagcctgataattcccaaccaccacccgaaggggatgctcagagccaggagcttctggcacaaatcgcgatgcttcagacgcagaaggttcgcctcaccgactttctggatgagaggtccgcgtatttggcccagttcggggaagaggccaaggccgagttcgacaagattggggaagatgcactcaaaggattggatgaagctggtgccagagtatgtctccttcggctttttttttttttttttttttttaatttgattacttatgcaactttctaccatggataactatttcacctagcaaattaaatacgctgctaataaattaagaatgctcttctaggccgaatactactccgattcaaatatcaaaataagatttttattttaataaagctaagaaacttttttttttctaacgactttggttaaactggaacacttcacttcaatcaattcacgtggttgatgctaatcaaaataagaaacttaatattacataactatagcgtttgaaatgtgtactgtaaattggttcatctatgttaaattgttccactagggtgtgattagcataggaaattttgatagtttacataaaggccttgattaattaagtcttttccaaattaagccaattttgattttttgttgattttttttcctacttaaaatccttaaattatttgttttttatttagatatttccaagatttataatgaatttgagatatgaaataactttaaaaatgtagaaaacataattgagtagaaagttaaaatttgaaggatattataagatgtaaaatttaagtctaggtttttgttctctaaaaagtttaaaatgttatttttaatctttataaaaattgtgtatgtgtttagtctctttaaaattgtatatgtttctttaattaaggtttcaaatttaagttttatagatgaaaaaaatatgattggtctcggtcatgttttaaaaaaaaattagtcttaacaaagttgataatacttaggaccaatatcgtgatgacgcaaaaacaccttaatgttgttaagaggctagaataacataattaaaatctctgcaaagtaaataacaataaataatctcaaatgaaaaatccaattacaaaattaaaatcttaaaaaaacaatagagctcgataattcaatctacatgccggaagaatgtatatattcaaataaaatttacttacttcaacaatgaccctttttcatttatttgtgatcaacagataacagcaaacatagagagccagatgctagaattcgaggaatctattgaacttaacagactagagattgaggagagtgaaaacaaaatagtggagtttgagggccaaatggagaaggatagaaacgaagggctattctttaagaaccttggacagaagccacctgtttacaaagcaaaagccaaggaggaggaggttgaaaagatcaaagttgtgaacagtgaaagcagtggtagcaaaataaggaaaaatgtttacctcttcttcattggcttgctgacttttggaatagttgattctcttgcctcatcctcaggtgctgattggaaaaaagttgcagttcttggaggtattcttgtggtcttgttttctctgttcatcaatgaacaaaacaaggacaacaagaaagactaacaatgaaaaaaaaaaaaaaaaaaaactcaagttcatttcttatgttgataaaataagaagtttctggggggaagacattgtgaataggtattgcatgattgaatatatggccccaagtgagagcttacaacttggacatgatgcatcaaccagctttgcttgggcatcaactacagtctacagctgatacattggtgatatcagttatcaccacaatattatccagaatttgagtaaactaattagcatgagatgctgcacaaatgcaaaacttctttaaatcttctgttgatacagaaaatatgtacatagcttttacctgcatcttcatcttcatggctattacaaatgtgtatttagaagcacaacgtgtttctaaatctttctatcatataaacaggtaaagataaaccatacgaagtgtactgtgcatggaatggagcagtttagtaatttcctcttcaaaggtggacaaaagagagatagaaagaaaaaagaaaaacaaagtaacatatgtgatcagtgatataatgagaaaagaatcaagatataaaaagaaaatgaggtgaaaaagagatggaagacaaagtgagcatatgtttactcaaacttttctccaattgatgtgtcactttgtgtttgtctaaagaactgcaatgatttcatatcaatttattttacaccatcttctatatggttaacaagagcctcttttattctcttccttctatgtgttggatgtcttgatattttattccgtataaaaaaatttgagccaaagaattttggtgtctaaagtaactaaataattactagcataacaatttgctgaagttaaaagtaaattgaaagcttcacctccttttaaggtaaaatgtaaattccaaatctagcctgaactatgacataccattttaaaataaacacatttgaaattaccatgatagtttcttttttttattattctgggaagggcctaaaggccaattactatgatagttacatgaaccaaaagctacgcctcatcttaaaatgcaggggcatagttacacgattctctcaaaaatcctgtgtatcgcaaaccgaatttaaacttttttaataactctgtattctcttaaaaaagctttttataaagagatgatgttgaaagctcatgttgaatacagatataaaagcttttgatccatccaaattctctgcggactcaattcatgaatcagagaactacaagtaaatcaataatagtgtttttctttcatttttcctctttctgccctatatccaaactctcattataacttaccacattcttaaacggcaaattgtcccttttataagttacaacacttggttaaatcataaatattataggttgtaggaatacaggctggtgattggaagaagattgaaatgaatataattcaatgaataaccctttcctcaattcccttgcgatattaacaatgtggctagcgtaatgcatatgaacactttacagtgaaaatattgtgacgtgtagtgtaagtgcatgaaattgaaagtagctagctaatgcatataaacaatggatttttttttagtcacccaaatcaaaacaaaacgcattaaacccaatttatctgaacgtataactgctttcctgttctaaacatgaaaaacaaggaatgtgagaatcctaggaacactactcaagttagaagaattgtaatgaattttgataatcctcaagcttaaggaaaagctacctctgatccaatagggtcgacctagtggtgacggttggatagtatgcatgaagtcataagtttttaagttcaatgccatcgctataaaaataaaaaaaaaataaaaataaaaaaataaaaaaaaaaaactacttctaagtatgtacattttaccttggcacacaacattggctatccttggaggttgttgcttgtttggcttatgagttgtgacttagttactgcttcatgttaaacaggacaaagctcatgcaataagactatagttggaattaatagataagagtgtttgatggttcctcccaagtaaaggcccaaaataagcttccccacaagtatatagaacttcaagaaagctcctctacattaaattaagtaaaggaacgtatcctcttaattttggtttttgggtacaatgtcctctttaaagtttaatgggcttttttcagctctgcaattgcaagcggattgattttttttaagtagaaaaaataaaaattaacaaccactgcgtaaaagtcattacatttgcaagaattattgcacaaacgaattagaaacattttcagattctttctttaaaaattatttatgacattagttatattattgcataaacttccgtattgagctaaacagtcaagtcatttgtcattactaagaattagttttaacaagtatttatataggaagaaaataaaataaattaaagaagtcaaatgaattaaacttatcaattctcacattagtgaaagttaatttttatatctcaattttaaaaataaaaataaatctgttcaacttctgcataaaagtcttataaatttatacgagatcaaatatttattccgattgaaaagatatcataacctaaattatgtctaagttataacaatggaataaatactacaaatagcagttttcaactttgacttcaattatttcataatccatggcctttttaagttggtgttaagaaacatatttctagctagagttttaatcacacttcatgaaaacaaatattatggacaaaatttatatacaatttcttatctatttttttactgtttcctaattagaattaaaatttcatcttgataatttacataataaaaaattatattaaagaacaatatatattaccaaaacaaaacatcacatatgattagaaaacaacactaaaattacatatttttaagaaaattaatttttatccttatattatatattttagtattttacccatacattttcaattttccacccttggatttgtagtatacccgtgaagtttttccgttagtcctgcgaataaattatcacagaggagagacaagtgtaaaaccgctgacaatttccttccaacttagtcaagttagacgtgccatttgagtcatgcatgaccctctattttttatttttttttatgaaaaatgcttttcttgcaactttattttacactaccccacaccacaccacaccccttatttccaccgtaatttgctttctttatcaccgaactttcattgaagcaaggactcaaggagtgacatgcatgtagaaatgttttcctcctcacttttttgacttctgtagcaataagcgcggtgataatggagctttacaaattttattgaaaagagagaaagcaccaaataatattaacacttgataattgaaatggggaacggattttattccttcaatatcctagtgggacatgcattgatcttacttgttgagcaacaatcattaacttctaatttgtgtctagatgatgggatttgagcttcaatataaagagtttaaagtgcttcttttttggacttatttgtcactgctttcccagtttgctaggttcacatagaaataaattgcttcaatctttactacgttaattagttagcatgtaaaatatgcagtaattcacaaataaagcttgattaacatgatttggtaaggaataaattcatgtttttaaaaaatatagattttattttcattattgatgtaaaaatcttgttgatatataatatgcaaatatgtttataaacattcattgaggttttaggtctattctggtccaatgcatttaaacttttttaaataacaaaaatacacagtaacttaattagtgaaaagtggaaaaccattagaattgaacaaatatgtgtacgtacgacaataataaccaaacttttttcccgataaggtaagatacatggatctcacgcataccgaggtaaatggcaaatctactaacaacttttttaagtaaatgaaaaaaaaaactttgagggaatataatgtttaatgattttataataacttttacttgtaccaaaaaataataataacttttactttctgagaccacctaggtaaaaactgataactcaacaactgtggagaatgaattgacaggtaaaaacagaagtgcaataataaatacaagctatttgaaaatagtagtgattttgagattgtataaaaataaagtgatatatatacgtcttaaatattttatgtaaagaataagttacttttcgttctttcaaaacaaaaagttacttttcgttttgtgacaactatataacaatatatctaatatctatttaaaacatttttaagccctaaaaattacaaatttgccctcatttcatattttgacacatgttctcacttatttggcaaaatggaaaatttaaaaaattagtgttaggacgaaagaataagaaaggcgtggtttcaaatttttttgaaatttttgaaaaaacttctctactgaatgacaagacaataagaagctattgtcactcattcttctctcttctaatttttgtctcttctaaaggagaaatgggtggatcatcaacaacactcacactaacatctctcatttcgctcttttgcacaccctccatgtttccaacatttttcttctctcttcatctcctctctaccacttcatttcatatacctttgggttgtcgtaagcttggctaaaggttcatttggtaagttagggtttttttaattgattttgtgttaatttcttttttattagcaatgtatgaatgttcgatttagtctgggtaaatactttttgcactgttttcactccttatttcttgttaggagtttgtttgaggtttagagtttgaagttgtttgattgggtttgagggtttggattttgggttttgatgtggtggagttttggagtttgtttgaatggtttagggttctagactaagttctttgttgactcaactatatgggttttgagttggctgcattttacacttcctctatgtgctttagggttttgggattagttgttcgttgtgtttaacatttgaggtttcaatctagttgttggtttttctgtttaactttgatgtgttttgggcgaaaggtttagggttttttggtatgttttgtatacttttactttgttttgttgtgcagatgaattcgtgagaagttggttgtaggtgttgatttggttctaggtttgtgttttagtcttgtgggtttttgatttgtttaagcaattttttttttgtttactgtttttttccagttgtgtggtgtacagattaaataatgagatgttggttgtctatacaacaatttatttgagtttgttgtgatcaacagtttggtgtcaatatctgtgtagtgtcattttgttatcaattggtttgctaatgttagttgtcattgttctaatatgtaaataatcatttctaacacttgagttgctcatgtgagtaatcattgttccagtatgtacaaaatatatgcttcgatatctatgtaggatttcattttcttatcgcttgctttgttgatttgagtgattgtttagcgtagcattttttttttgttgagttgtgttggcatcatttgtttcattgttatgccaactatgcatatcatttgactttttcacttgtggttgcaaccgataatgaaaaggaagttctatttcataaaagatattgatggaagatggtaacaatgtttaccatttcatggattttgaagatatccttactagaagggaaaattccgatgtgttaattggtaaaatcaaggaaccatgttaattgctaacaatgttgaccattttttaagatgcttatagtttattatattgttcttttctaattaatttatgctcttaagaagttggtactgttagttgtgccattttcttccgatattattggtgccattgaaaaaatcactttccaacgaattacaaatgggaagaggaagatagtgtttaatctgaaagatctgaggtgtttttcaatgcataatttaatgaattgtacttatcattgctcttgagtatgttctatatttattgacatgtctaaatgtttatttactgtagtgggaatgtacttaattttacattgtgggaagattatgctctgaaattgattgaattttcacataaaattttgtggtcgaggatttaattcttattgtcttgacacatgccaagataaaagaagcaaatggtgaatataataactagcaataaaatattttatatatttgttatattggtattaatggtaactgacccacgttcattgctacaagtatgtttccacttggaatctcaaactcctatcactgctccaaactattcatcaatgttgatattgaaaaaattaaaaaatttagtaggtttggaatgaatattttttatatatacataatcttaataatgggatataagtatgaatgatgttattattatgtaatattttttcagctttgatgttagtagcttaatgcaaatagaaacacaaagtgaaaatctatctcaaatcaaaacattctcacagttttctgcaagctctcaatattcagagtaggataattttatgtacaaagcaaatgcgaagacccttagtcggattaatgagactagacaagttttttatttttgtatcattgtataattttacaccaccatttaatttagttaatttatttttttctcacttattaatttgaaatattgtgttattaatatagtgttatgaaattatgcttctaggaaatccaatgtctcattattgctacaattggtaaaatcattgttgggcaaatggatggtactatgaagagtgcaaacccaaagaagctcccttacacatgtatttgtggtagatacattgagaaacctgcatcaagattgtaatcatttttataaatgacattcaaattacttgcccatttttaaaaatcactatattctttgcactttctctcaattttttttatcattcataggtataaagttgaggttgaagtttctcacaacaagtttaattcaaaaaaattttcctctgggatcgagagtgtgaaggctcctaatgattgaggtacatgtttgcttctttgtcattgttttttaatgtccataatgggctttaattctaaaacttaataattattggttaacttttatatcatttttaaaggagcttggaaaagataacccaaaagagattccaaaaccattggattggatgttaggatatacttttgccttcagagttagagtccaaccaaatggtgtcatgacaatgtctaatgatcaggaattgatcaaacttataatggatcgacttggacttggtgaggaggtcttcaacgttttagtttttcctatgattgatactatattttgaatatatacatatatatatatatgtgtgtgtgtgtgtgtgtgtgtgtgtgtgtgtgtgtgtgtgtgtgtgtgtttgaacgtcgcccttaactttaagactatgccatcctaaggtgctgctagatggaagaatcttatcaacgtccatgaatgataaatcatagcatagatcaaactgccgaattggaaaaattgaagtgctatgatatagctttgtatcgactgtgtgtgtgtttatttttttggtttgatcatgcatatttactcatgatatatcttgttgtacaagctacatctatgtctgataagtcgatgcatacaatgaaccttgactcacaaactgaggtagtcaacaatttattatatttaaacgcctgatttggtagattatatcatgtaaaatggtttttgagaactaacacgtataatggttttacaaactaataattaactatttgtttgtaggtttctgattttatatgtatttctaaggtacatttaatagttttgggtctatgtttgttataaatctaattgatcattacacaatgacaaatgtttatgttctatgaatgttaatttgtaacgagatttatcatgttagaatactaataacaatgaaaacttttaactacaacaatcattatctggaagtattgatcatgatccagagttgagaaatcttgttacacaagcaaaaagataaccatctcagtgagaaccagatgacaatgtaactctggatttggcttcagcacaactttcttcaacaaaactatctaagcacatcaaaactgaatgaaagcttacattcaagactttaaatcaataaatctagcgtgctttgttttgtgggtcaagttaaaacaacttagaagttgtcttttgttgtgtaacctgaatactagatgttggtagaaaatagttatgtccaatataagtatactatggattatgtatatggttaagaaaactttatggtcatactctattgatgttttgtggatgattgacacctaactaatatgaatatgtaatcaagattttgtatggttactctccaacttgatattgatatcaacatgttacttcagattctatttcctctaccaaatgatattgagccccatctaagttaaattgttgacatatttaaacattgatcaatatcaattttaggctccataaaagtctattttaaaatggatcgttattgaacaatatttaatagcacaataaattacattgatcttattgtttaatatatatgcattgactattatacctactacttatttcatatattaggtgtcaacaaaatttcagtaacaaagagatattgttataatcacatatcttaaaatgcaaaagaattgaacaatatttaataccatagttaattatttttattttaatattaatgtacaacatattataccaacttcttattcaaagtgatatgtgccaacgaaatttgggtaacaaaaaactactattataatcaaaatagttacgggtagatataacagttataaattatatcatttattttccttgtaaaattaaaaatatgtaatttatattatttataaaacataaaataattatttacatttgctaaaaaaaatgaaagatgatgaaaccttctaattctcttatagtctaatttcatacgaaaataatgtctacactaatatcatatcagctataagtctactcaagtaattttgtgaaaagctatgtcgaaaaccctaaggagagagaaaaaatctacaactccattagtctgaaaatataataaaaaattcaatcaaaacgcagaaaaaatttcttaactctcaaccattgtagcttagtatgttgacccaagcaaagcttctaccttcatctatcttatcttctccaggtacctttctttatttctcttcatctaaatatctttcattaacctttgttttgcattttaccatttcataatttaattgaaaataaaggctacaatagacttcactacatgtattgattaagtgggttaaactgcaaaacaaaattccattaactgctacctattcgttcttattgtgtttatacatagccaatttttaacaattataaacaaatgtcttttcatttttgtatcaacagaaaaatgaacggcaaagaaaatagcagtaaagaggttgttgctcaagcacgaagaaaaaggaaaaaaattgagggaaaaaatgctgacaagtataaacatatatgttcaagcaatcaaagaacaccactttctgatgtaacataatacaaaggaagtaacagtaacaacaacactgaatacacacaatattagttcattcaaccaagttcaaatttggaccatgcattgcaaagcaaaaggaccagaactgaaatgcagtataatggccaaaacttgattaataaatttgatgttgtcattttgaaccaaccaagggtaaacccattatgcaacaatactgattaaatttaaacaagaaaaaaaatgcataaattggatatacaaatccacaaagttcaagtcaaactggtagcaacaacaatcgcaacactggaaattgtcactcttttgcagaaacagaaggtggattttctatttcttttattctactatggttttttcatataaagaaaacatggttaattagttatgacttttgtcaaataaaatgagcaaatactaataaaatatttgaatctactatattttagttcagacagtgattcaagctttgaggatgatgattttattcatggaaatgctactgcctcaacttttaatgtccaccaaggtagtaatgtgatatgaacaatatttcacaaattaaatagaaaattataatcttatttgttaataaaaatgtataaacctatttgcatagtagttgatatgaaattatttttcatattcattgaataggatattatgatatcgatgattttatttatcaatgtcattattgcaaagcacttatgtggtatcaagagaggatgcaaaaacataagcacaccattacttccaaatgtctttgttgtggcaatggtaaagtccagctaccattattgaaagaacctccttctttgcttcaacatttggaatttgatcaaaatttagataatagcaaaacatttctagcataatattagagtgtataacattatgttttccttcacttcacctggggtaaagctagatccacatatatataagagcctaggtccaccaacaataagatttcaaggtgaatcatgtcatagagttggcagtttactaccgatgccaaaacagtccccaaaattgcacaaccttacatctatgacattgaaaatgaagttcataaaaggattcgatcaatgaggtaaagattatataaatatcgagttttaaaattttatatacatatcaaagtttcttttaattttaatgtttactaattgttatttgcaagcaaaccaatgttgatcctgagattgtcaaaaaactttcaaacatgctagataaatacaacacatatgcccaatgcttcaagcaagctcgagataaattgaaactagaacctgcacataacttgaagctgcagttgatttttgacagatcaactgatggtagaatttataatattccaaatgtttttgaaatagctgttgtgattgttggagatgttgacttagcatctcatggggatataattttcgaaaggcaatgtggcaaattgaaaaggatagatgaattacatccaagctatttaggatttcaataacttcttttattcatttatggagaagacaaataaagatgagatgtgctacaccgtgattctcacattactcaagacactaaaaggaattggttgactataagagaatgacttttttccatatacagactagaatgaatgaagcacatactttaattagatcctgaagactatttcaacaattttttgtagacagttacatgatgcttgagttagaaaagttgttctctataagatacaatcaatgtaaacaactagtagataagtattctaacttgactgatgtagattccaaaaatcaaaatcaaggttctgatagaggaaagtgtgtaatcttgtcatcatcattcgttagcgatcgtcgctatatgggtcaactttactttgacgcaatgtctatctgcagccacattggatttcctgatttgtttatcactttcatgtgtaattcatattggaaagaaattcataggttgcttactctattgaatttgaaacctatgcatcgacccgatattgttgctagagttttcaagatcaaatttcaagagttattagtagattcgacaaagaaacatgttattggcaaagcgattgcatgtaagatttttaaaatcctagaactctttgatattcaatatatattttcaatataccaacattataaatcataaatttttttatacaaatataaagttttgatattaaatatttaaattaaacaattagtaatttcagagcataatacatgacacttatattttccatagcataatacactacactttaaagataaatcttattatcaacttcaaaactcaaaatctatgagctattgacaaacataatccgaattttttttataacttatgcatagttttattttatttctcttatctgatgtgaaattcttaattttagatgtgtacacaatagagttccaaaagcgtggattaccgcacgctcctttggttatcttcctacatcttttaaataagtatcatacaccagataacattgataaaataatttcagccgagatatccagtgaaaatgacaatccaaagttataccagttagtaaagtcaaacataattcatggaccatgtggcttagctaacaagtccttaccatgtatgaaaatgggaagtgtacacggtagtatccaaaaaaaaattcaaaatgtcacaatattaagatggattccctgtatatagaagaagagatcatggaaatacaataaaaaaaaggtggtctaacttttaataatataagtatatttccatacaatctaatgttccttctcaagtaccaagcccacatcaacatggaatggtacaaccaatgcacttctattaaatatttgttcaaatatatcaaataggggttatgactgaataattgctgccattgtcccaaatgaaagatgacatacatctcaacatgcaccaaatgatgaaattaaacaatatgttgactgcagaaatatctctccatcagaagcatgttggtgaatcttctctttttcaattcatagtagaatgctagcaccaaagagattgttcttccatttatcaggagaacaatcagtgtattttaatgatgttgaatcacttgatcatattctttcaaatccctctattaaccaatcaatgtttacatcatggatggaagcaaataatacatgtgatcaagcaaaaagtttaacatatggtcaatttgtgtctaaatttgtttattgttaaactattgacaagcgtaacaatgttatcgcagtttacaaaatttataatagatcgtctccacaaggacttgagttactcagttatttaaataaaagtaacagtttaatattttatgtataacaagtataagcggcatttcatgagtttgagaaaataagaaattacgagtttaaagaaattgcaaaaataacggatttagtgcgtcgaaattacagaaaactacgaaaacaagtgaagcaagtttaattaattcaagaaaagtgtaggattggacttcatcattcaaacccttagtatctaattaacattaccatgtataaatcattttctaacattattgatgcaaacgttaaattatcccaaattctttccctcacatttgagaatcctaaggatatttactaaatattgatccctcgcatatgaaataaatatcccagcattatgatcataatctcgtgttgtttgcaatcaaaacgttatgctctattcctagcaacgcaacgtaatgagtaaaatcattcagctcaaatcctaagagcactttccagtcaaacttagaatccaatttcttgagactagtgattaagtagaatcaagcattaagaacagaatgaaatcaccaataatgagtagaaaagattcatgcatataacaaatattaaaagaaatacataagggtatgaagattacatcaaatccttaggagaaactagccgatcattgtggagagcacaagatcaactgaagacatgatgaaggaagcgatcatcgatcctttctgagagagtttcctcactaatttctctcttatctcacctttctctaagtttccttgctactggttttcgttcatggctccttctcttcactttgcatggccttttgtaggaaaaggtagagttggttaggcaaactcgcctaagcgagctatttacctatgatttgctcgcctaggtgagttgttccttaatgatgaagaacttaactcacccagagagtgatttacacatgttttacttgcccaggcgagctaattgctatcttgagcgaattttgacttccagaaatttctcttttgaccttttcacccttttctcttgtcctggttgtttcggatgccacaaatactataacgacctaatttctaagttgattttattactagtatttttacgtagaataattttttttcaagaaacgtgtattagtaaaaattctaagtcattaaaacttataaaatatgtaaagactaatacattagtcaatgtctctattacaaaagtttatacaagtacaaaactcttttcaaaatccagcctagtacatagtttcttcaatatattaacactactccagagcctcaaggaacctgatcagggctgccatctaagaaaaacaggaaacaaatcttgtgagaaatgaatttctcagtaggcaaagctaaatccgaccttattagtaggttagtaaaatcattcaaataatcaaacacatccacaagaaatatgcaactatatgaatgcatgagatgaactatcccaaggcaaatggcctccacatatcgtactgtatgtggccacactaagtgcggacgctgctacagtcttacgtaaacatgcatgaattttgccatatatccttgcacttgggtactacatatcgtactgtatgtagcatcagattatgtttccctaaagtctcgtactggacttggatcatggaaacatgaatccacctatcttattcacatcaacatccataaaaataaaatccataagcaaaatacatattaccttatggaaaatattttcatcatatcatcatatgtatcataagtatggttaaaccgctatatcttattcaagcaaaagtattaccaacttaggcatgaccaaagaatatcctcacagaaaattatgttagtaatctaactaataatccataatatgtctttcaaataatttctaatcccttgaaattttcataataaaagattaaagcctagtatgcatattttattctcctttcacccaccacctcagtaattaatcctcaaatcaaatcatcaagtatttaaaccattcaactacataccattcatcctctacttcaaaaattaaatcaaaatcttttcataaaaatatcaacagacagcccaaaatatcatcaaaatcacataaaaaaaatcatcaaatgggcttccatacatcactaatattgatgggtataaatcatcacctatcttatggcttaaatcaacatattctcatcaaagaataaccttcaaatagcacgaaattcaagcctaaatatcaaccataaatcagcctactaaagcatgtaaatcaacctaaaccattgattagctagagatttaagtttaacctacctcaagtgagtttgaattttgatatccctttaaatgctcctagttccacgtgagatttcaaagtagcaaggcttagggttttcttttagtctacttgaaaatgataggtaaaaaggatgtagaataataggatgaaaaaggaaagaatgaaaggaattgaaaatgaaatatgaaaggaaggtaagggatgttgcacgttcacttcccttggaggcttgatgttttcggctactactccctctatttatagtgttaatgaacttgtttaacaagcctttaccatgaaatatcttctaggtcattatgaccttgctttacaaatggtccaatcatatgagttcttgctttttaaccatacaagtgtcccttttcttgatttttctcaacacttcttcattcttcttgatgtgcacatggagtagtttggcttgtagagcaatcttcaccaattttcgtggattggctagatttttggaagattttgtgcttttcttcattcttgattttaccccaaaacccgttttcgtaaaatattgattctgaattcattaaccgttggatcttcttaaaattttaaaggtacactactatcccacatatgtaattgatcgttgggattgttgaaataaggtttagagctgtccacgtgcaagatggaagagtatagagaaagcttggctacaaatatctctagggttatgatgacttagctttttatttggcttaatcctattggctattagttcttcaccctacaagtgtccatgttcttgagaattctacatcatcctccttccttcttattttgcacgtggagtaccaagcttgtagtgaaatcctcatttgttttcctttcctacataggatggctaggctttagttatgcttttcttcattcttttacttattatagaattcttgaaattaaattgtttctagcttttagaaaaatctaatttacattttaacacctaaaagtaatataattctaggttaatcataatcctattaaaatgttttacaagtaatacatttagggtattatttacctacaatttacatttaccttaattctaattggtccatttacttttgattattaaaattactaaattggttcatcaaatgagtttattccttttataattaagagaaaattctttagattatctgtatcatttttccatatttttctgatgcttgagttttcttgaatacagtctcaaagttgtcatcttctaaaatttgtagaaattttattctagagttttttgtcacaaaatatgttgatacttagtcagctaagtgtattctataatttcatcaactttctacaaaatttctaaagttatttgagcatttttggcctaggggcattttggtaattatgccattcaacttaggggtattttggtcattttcaaaaatgtccaaaggcatttttgacattttcatcttaagggttttctagtaatttctacttcttggaaagagtgatatagttatttttctctaaacatacttctatctaattatcattacatttttataattttggggatgttacaaatacacttgatacctatcaaaacatcgcaattgagtggataaatcttccaaaatgtaaacaacatttatatatgtaccaatatataaacacaactaggattagggctagtttataaaagaatttactgaaattaaaagaaaagtgcccacattataattctaaaaataactaaaatatgacacttatcaactacccccaacctagaatcttgcttgtcctaaagcaatttgtaaagaaataaaactacgaatactagaagtataagacttaaagaaaatacttcaaaatttatgaacatgctttgtaaagaatcaactttcaaagtgatcagaacaacattttcaaataatcaactatgagaattgcacgaaaggtggaattcaccaaagcaaatgagattaagatcaatttacatttcatttctaaagaacattaaagaaagcatttgattgatccaaacagaggaaaacctctcaaaggtctttaattgtcccacgggtaagtgtttcttcttaattccgacactgatatgtcatagatcaattttgcagttcatttcccatcaaatcaaagtacgtatttatcatggatctttaggactttttaaggttgggtctggcttttgaaggaaatcttggtttttctagatattcaaagtaaccctaagaataggagagcaaacaaaagataaaacaagctatcatcacttcctatttcttttctttttctactagttatcaatgtttcttattccaacctcccaatcacccaacgtatagagtttacaacactctgttcaattttagaacatatttcatttaattttttcacaaggaatttatttcatttttcttttcttcttttcttttctatagctttttccacatttaaaagaaagtatttttcatcactttagctatccaaatgatagaaatttccaacaaaattcccttttgctctcctaacctaaggtaaggtaggaaattcttagcctaggttagtgttccaacaaaatcataagtgttttggctcaaaagggctagcaaatggtaaatcattgtatattgggatagtttttttgctagtggcttaaaaatgttcaagaaagaaagaaggcctaaaccatacccatgaatcatatgttatgacaattagaaattcatgtaaaatcatttatagaacatatcggtgaggacactcaatgcaatttttatggtcgcacacactcactaaagcttaaggtctgtttccatgttcaaatcaaatcagtgtttcaaaagttgttcgttatcaaatctatgtaaaaatatctaccttcatttggtatttgagaaagtcattcctttgttttacatgctcatagtttccaaaaaaataattttgttgtgttctgatccaatttcaaaagtaattttcaaaaataatatctgttgattctttccaaaacatgtaagtcagtgaagtcccaaaaagatatatacaactatgtttaaaaaaacaaaaattttaatcaaaatgtgtacttccaaaaagagagagaaacctctgtgtacacaatcaaagtgcgcaatatcaaaaagaatcataaacgcgcacaactattcaagtaaataaggaaacaatgtactgaatttttaaaataaagcagtaaaaaatataaaggcaatgtcacaaattttttacgatcatggttgaggagctcaatctccttcattcagataatcaacagaatctgccatgttcttcattctcatctactctgcctcctcctgaaaaataggtttgtccccaggccctgcaatggtagctctaacaaaacaaaagatatattcaaaaacataaaattcaaaagtacagttctcaaatataattcaaaaacataagacacaaattaaaacagttttagaaatactaggttgcctcccaagagtgcttctttaacgtcttgttagttggacgcccttgttgtagctcaaactttctgcaattggaccactgtggtgattctttcaacatcaccagccaagtagtgtttgactctgttaccatttacagttcatgtcctctttgtggctggatcttctagtatgacaactccatgtagcatgacttcattgatgatgaatggtccagaccacttagattttagcttacctgaaaacaatctcaatctagagttaaataacaaaacctgttgaccaagctaaaaattctttttcaaaagcttttttttatcatgataaattttaactggttgtttataaagcttagaattttcaaaagcttgaaaccttaattcctccaattcatgaagttggagtttcctgtgttcaccagttgcattcggataaaaattcaaaaatttcagtgccctgtaagctttatgttctaactcaacaggtaaatcacaagatttgccatagaccaattggaagggtgtgagtcctgtaggagctttgtaagttgttctgtatgcccacagtgcttcatctagcttttgagaccaatccttccttgattaagcaactgttttctccaagatcttttttatttctctgttagaaacttcagcttgtccattggtctggggatgataaggtgaggctaccttatgtctaacactatagtgttggagaacttttttgagttggacattatagaaatgagatccttcatcacttatcaacactcttggtcttccaaaccttgaaaaaatgtttttcttcaggaagtgaatgacggtctttgcattagcgtgttgtacagctatcgcttccactcatttggttacatagtccacaaccaataaaatgtattcatttgaataggatgatgagctctcgaatttcaggaccttgtgtgtttacttcattactggtaagtctggaaagatgatcaactacatgattttcactccccttcttatcctcaatttctagatcaaattcctgtaagagtagaacccaacggataagtctaggtttagaatcagctttgactagcaaatattttatagcagcatgatcaataaaaaccataaccttagatcctatcaaataagatctaaattttttcaaagcatacactactgcaagcaattctttcttaattgtggcataattaatttgagtttcatttaaaactttgcttgcataatgtataacatggaaaactttatttttcctttgatccaaaattgctcttacagcataatcagttgtatcacacattatttcaaaatcaagtgtccaatttggtgcagtgattatgggtgcagagatcagtttttgttttaaagtgtcaaaagcttttaaacaggaatcatcaaaatgaaacggaacttctttgttcaagagattgctcaagggtttggcaatcttaaagaaatcctcaatgaaaatctcgtggaatccaacatgtcctaaaaagtttctaatgcctttgacatttgttggtggaggcaatttttcgatgatgtctaccttgggcttgtcaacctcaatgccatgaacagagatcttgtgacccaatacaatacctttagttaccatgaagtgacatttttcccaattaagcacaatatttgtttcaaagcaccgctttagtatagtatcaagattagaaagacatttatcaaaagaagaaccaaaaatagaaaaatcatccatgaatacttcaatatttttttcaacatcggaaaaaatagaaagcatgcatcactgaaatatagcaaatgcattacaaagaccaaaaggcattttcaatacttgtttctttttcttcctgtttttcctttctgtcttggtaatttatgaatcaaataaagatttatctgcagagaacttaccttgcataaaggaaaaagaacaaactacaatatcctgtaagcaccaaggttaatgaaataaaatataacaaaagaaaatttatacaaaataaaataaaataaataacgaaagtaagaaaaagtcctattaaactgaaaaaattaaatctaaaagaactgagcaagtgactcaagtccccaacaacggcgccagaaacttgtcagactattggcaagcataccgatgtcgtcgcatgttacaaaatttataatagttcgtctccacagagagacttgagttactcagttattttaaataaaagtaacagtttaatagtttatacacaacaagtatatgcggaatttcacgagtttgaaaaataacgaaattacgagtttaaagaaattgcagaaataacggatttagtgcgtcgaaattacagaaaactacgaaaaaagtgaagcaagtttaattaattcaagaaaagtgtaggattggacttcattgttcatacccttagtatctaattaacattaccatgtataaatcattttctaacattattgatgcacacattaaattaccctaaatagatccctcgcatttgagaatcctaaggatctttactaaatattgatccctcgcatatgaaataaatatcccagcattatgatcataatctcgtgttgtttgcaatcaaaacgttatactttgttcctagcaacgtaacgtaatgagcaaaatcattcagttcaattcctaagagcactttccagtcaaacttataatccaatttcatgagactagtgatcaaatagaatcaagcattaagaacagaatgaaatcaccaataatgagtagaaaagattcatgcatataaaaaatattaaaagagacacataagggtacgaaaattacatcaaatccttaggagaaattagtcggtcattgtgaagagcacaagatcaactgaagacatgatgaaggaagcgatcaccgatcctttccggtagagtttactcaccaatttctctcttctctcacctctctctaagtctccttgttgttggttttcatggctccttctcttcactttgcatggccttttataggaaaaggtggagctggttaggcaaactcgcccatgtgagttatttacccctaatttgctagcctaggcgagttgttccttaatgttgaagaacttaacttgcccaggagagtgatttacacatgttttactagcccaggcgagttgtgtcttaactgtgaagaaaggttaactcgcccaggcgagctaattgctagtctgggcgaattttgactttcagaaatttctcttttgacctttttaccctcttctcttgtcctagttgtttcggatgccacagatcgaaacatcgcaattgagtgcataaatcttccaaaatgtaaacaacatttatatatatataccaatataaaaacaactaggattagggccaatttataagagaatttattgaaatcaaaagataagtgcccacattataattctgaaaataactaaaatatggcacttatcatttatgtgaaagtagaagatgttggaaacctagaaagaaaggtcatacaactggaaggttgacgtaggtgccaccaagtacaggagaattatattatgtaagtttgatattaattgttgttaaaggcccacgtacttatgaaaaacatgttttatccaacattcgaagaagcatattttgctttgggttttgttgaggatgaaaaagaatacattgaagcaattagagaagctaaggattggggatctggtcattttttgagaaaattatttgtttccatgttcatttcaaacaacatgaataaaccaaaacatgtttaggaaaatacatggcaatggctctcaaacatcattttgtatgaacaaaggagattgacaaatatccaaggtacaaaattaaaaacctacctaaattagtaaatcatattccacttttaaatctattctaatcaaatatttggctttaacatttcagatttacagctcggtatagaggaattaaagaatttcacacttttagatattgaaatattgctcatacataataggaaaagtcttaggatttttcactcatgccatatctaaactattttgtaaggagcgtattaggaaataggcttatgtttacagagcttgattagacatcgttgaaatgaagtctcaatttgacaaaaattacaggtctctaacatgttagattttaattactgatttatattagaagaaaatcactttaaaatcctgaactatgtactaatattggttgttgcatatgagcaaaaggatatatttgagaacataatgtcagttgtaaatagacagagaggtgttatgtttttcttatatggttttggtgggacatgcaaaatattcatatgacaaacattagcatttgcgcttagaagtaagcgataatttgtgctaattgttgcatcaagcggtattgcacctttactactaccaggtggaaggactgcacattcaaaatttaagatacatgtgcctactcttgataatttagtatgtaacatccaccaaggaagcgagcatgcatatctattaaaattgggccaaattaatcatatgggacaaagctccaatggcacataaacactattttgaagtgttggaaaaaggttttagagatattatggatgctgaaaataatagctttgtagttttcgagggcaaaatcattatatttttgtcattccaagaggtggtcgatcaaatgttgtccatgcaactattaacgcatcttatctttgggatcataaccaagaatatgtgtttggaaagttcataggacaatatgtctattgctgaacttagacaattctctcaatggatattagatgttgggaatggaagaataacataaccaaattatggttatgctacaattactatacctgatgagtttctaatttctaattttgaggatcacattcaagtcattgttgatagcacatatcctgatttgtctacaaattacaaaatcaaaggatttctacaatgtagaacaattttggcttatacaatagaaacaatggatatgatcaatgaatacattttgtcaatgattccaagtaacaactttttttcattggccgatttataaaaaacttcatattttatctacctttttatttttactttacaatttattcaaatatgtatttaatttgttaataatcttcaagtgccatttatctttttactgatatagatgatgaaaaagagtatttgagttcatatttcattgacatgactaacatataagacaacatatcttttcaagtaatcacacctgagtttcttcattgtcttagaacatcagggttaccaaatcataagataaggcttaaagtggacctatcatgcttttaagaaatttagaccaatttgaaggcttatgcaatggcactagattggttgtcacaaaattaacaaaccatgtcattgacgcaaagtttatgtcaactgaaagggatagaaacttcatatgcataccacaaatgtcattatcactttcatagtctccttggccatttaaactaattaggaggcaatttcctattgtcatatcctatgccataacgatcaacaaattctagggacaatctttgacaaatgtagggctgtaattaccaaaaccagtttttagtcatggccaactttatgtggctatctctagagttaaaaaaaggagttgactgaagattttggtacatgataatgaaaggaatccattgaagacaacaactaattttttttcaaagaagtctttcaaaatatttttagcaggttcatgcttattaattttaagaaattacaataaccatatcatatactcatggctaattattttttaatcctgcgacaaatctatcccaacatcacatttttttgcaagttcaagcttaataaaactgaaactttttgctgctaccaaatgactatattatgaaccattaccctgttttactttctatagattaacaatgatggtcatttgatcaaatacaatagtgaaaacctatactttcaattgaatataagattctttgtatataattcaattcttactacttatatataaattgcaggtagaatgaatgttggacactcaactaacaagtcattccattaacttttttgcaaaatgatagtttttttgcattgaaagttttcttcacaagaaaccagtagcaagtaacaattttttttaggttttctctagacaatgaaactgaaaaacaactaatgttattgtttcaatccacactacaaattgcaagttatcactgcatatggaaatcaaacattacatatttcaaatagtattcttttactaccactaaggtttaaaatataaataagcatattgtacatcaataatattattttatattatccttaagatctgtttcatgactttaagtaattttctttactgatatatacatgattagtgaaactacgaagtaagcaatgattgcttcaatcatttccaatgtatttcatacacattcaaacaaggtggattattaccttaatactaaacatattctactcacatactaattaaatttatgtatataaaaccatgtattttacatcatcaaaacattattttaatgcatttaaactattttgtgtagttatggaaactacaagtaatcgttttttgttttgaaattttttttactaggaaccgataacaggtaacgattttgttgtttgttttagacaatgaaagtgaaaaacaattaatattactattttaattccacactatatgttgcaggttatcactacatatggaaaacaaacattgcatacttcaaataatgttcttttattgccactaaggtttgaaaatataaataagcatattgcacatcaatgacggatatcatgactttgattaattttttctactgctatctaggagattagtggaacaatgaagtaagcaacgattgcttcaatcatttatagtgtatttcatacagattcaaacaaagtggatcattaatttaacactaaacatattctacttatggactaattcaatttatgtgtatagaaccatgtatttcatatcattaaaacattattttaatacatttaaattgttttatgcagacacgcaaattgaaagttcctaaattgagagaacaaagaaaaatttgtcagcatttgacacggttggacaatattttgtgaagcaaacgcttatgcttagcgtgaccaaatccgttttagattcctacacacctcatcaaacattgcccacatcacaaaagtgcatgattgagctaacgtttaacaccaagtatcaccaatgtcgtggttggtgttttcatgattaagttatgcaactcctaccgtacttcactacacttttgattatatattataacattgtaaacaatgaagtataataataactatatttaaattacatatttgcgttcaaattaatgtcatttctacacccatcaaaactttaatacaccctaactaaggtctaacctactttgtattattaatttatctcaaaaggtaatttttctaacattcaaaaaaaaagtttacttcttaatctaatcacaattttcctactaaaacaaaaaaaaaaaaatgaaatatagcagagcgacccatgcacatgcacaaattacttactagttttattttaaaatattaggatatatgtcttctttttaatttctcaaaataatcataaaagctactcaaagtaatttcttaaaacaataggatatatgtttttcttttaatcttttatttttctttcaaatatttaagcaagcatattaaaaattttaaaaataaaagtgatttttcaaggaaaacaaattactacctatgctcttatttataataaacaagttatagtgtaaaatatactataatttattttttataaataagatcggacgtagtataacaaattgacttagtcacattttttggggtgaaaattatttctaatgaaaattataaaatcatatttttttttaataaaggcattaatttagtaattttaaacattttgtttttatgatatttaaaaatatcatttattgtttctgggaattactcctttatccgagagttcaccgtataaaatgcacttttttattaatatatatatatatatatatatatgtatatcatagtattttatacatatatatcacgttttacttaaatgtctctttttaaaaattgtcgttcagtttactattacttagacaataactaccgaaaaatatgattattctatcataaacgttttaccataaatttaaaataactaaaatatcacattattttattataacaaatctttaccaagaataattatatatatatatatatatatttcttttctagctaaacacatggatggacaaagtaagtgtggggttgtttttgtttaatttttggtctctaagtttaagtcttaatagataattttggtgaaattaggagtatttatggctaggtgtcattcgtgaatttgaattgatccaaacttgtccaaacaatttgagttgaatcatttatgtattttggtcaaatctgaattgaaccgatcaaaattattcatatacaggttgagtcacaggtttagatctatagatccgatcaaaatcgaaccaaacatattgagactccaagtgttggaactgcaaatgtttataaattaatggatcatgttttcttcatttgtttcaataaatctagttgcaccgaagtttattgcaataatttagtttgtagaaaattgttgtgattcagactattatagtaaataccgttgaagaatattttgttttaatttgtattagtatattttagaatattatgttgatggtattaaatgaatcaattttattactttcagacatttgataataatgtgctagggtaaattgtcattttcatccctgaatgtatagaacactgacaaatttgtcctcgaaagatgaaaattcaaattttagtcctcaaaagtaaaaaaaagtgcgacaaattcattcatccgttactgttaatgaaagagcctacgtggcacagagtgacgaaaatgtcataaaaatgattgccaacatgactgctgaatagattggaccaaaatgttagtaagtttccattggactaatttgttagaccccaactttcatttcatttaaggataaaatataatttaatcttcatctttctcttttttttttattctaacatgtgaaatataatttaactcttacattggaccaacacacttgattttgttctaacatgtaattcaaaaccaacacgcttgattttgttctaacttgtcattaagaaagtttctttaaaatatggtcttaccagctcaaaggataacaaccaattaagcgcatatctgacgttgtcaagtgttaacttctcctaaaacagtattgggtataacacaaggatttttaaaacccactaaacagaaaggacacaaaaccaaatcaccgttgataataataattccatagagagcaagaatagaatcgaacaaatcacatccttatttgaaatcacactttaaaaatcaatattgccctgacaaccttaaatgttgcttcaacttctatagacattttgaatggtattggagagtttggtaatatggaaataagtaaaggatgtgattttggtaaaaacatcaaatttatgacaatctttacggtgtgaaaaagaacccgagaaaaggatatgtagagagagaaaacaaaaaccatgaatatcctatgctactattatatttcaataatgtgccaatgatcttggtagctgagaagacaaacaaatagttataacaaatttgcaatgtgtgtaaatggatatactaaaatttgaatttccatctcttggaatgaatttgtcatcgctctacacatttagggatgaaaatgactatttaccctaaattgcattttacccttaaatgaaacgaaatttgggatctaacaaatttattcaatggaaatttactgatattttggtcaaatgaaaatttattgacattttgatccaatctattctgtagtcatattgacaatcatttttgagacattttcttatctttgtatcgcgtaggctctttcattagcggtaacagacggaagttaacatatgaatgaatttgttacattttttcactttcgaagactaaaatttgaattttcatcttttgaggacgaatttgtcaggtctgtacacattcatggatgaaaatgaatatttaccctattatgttaattgtattggatatttggatgaatcatgacataaaatagtagttttaagaaaaaaaaaagatcaaatttaaatgggtaatccgttagtctactaagtcaaaccgttcatgaatgagttgggttacgattgatttcaaaaaacaatttctgaaaattgatccgaattaaatcgaaccgatcaaatttgattgaattgagtcttaaatttgaccaaaaccaacctaaacccacccacgaacacccctaagtgaaatctcaaaacaaaaatctattttttataaaaaaaaattgttaacatgatttaatgattaattattttgaaagaaaaacatttttgaaattggattaaaatccgtcagataatcagattacgcgccatttataagaagtatttgacgaatccctgataaactcacaacaatactttaatctagaaaattagattccaatacaaattaatctaagttttacgatttgtaaaatataaaataatcacatttgaagttcattgattttaacatgtgatggcgcattaaaatgagcaaagtataattatatttaacctcaagtttaaattttttttttcatatataatcttatttgagacacatatcattaaatttgaacaatttttttatgaggattaaaatcttaatatatcatattgtgaaagattaatttcttctcaatctcatcttaaataatttgtttttacaaaagcttagatacattttgatatagcaacattaacgatattcattgacataaataaacacaaaagagagtattaattatgaggctggaccgacaaatctcatactcaaattatttgtttagtagggaccgacccatatattctgcatcatctgcctttccctgtagttctcgaaggtcggcaatccctcttcttagaaaaactgatttggggcatccaatctgcttcccttaatctgtgcatgtccagagaagaaaaactagtcccaagaaataatattctaatgctatgaaacaattgaaaattcccaaagaatctcaactgtacaagttataaagaaaaaaaaaatgcttttctctaatttgggctttacagttaagaccatctacaatataaaattaaaaagttcaaggtgcgttttggttattttatgtcttattaaaagtgattttagtacttcacagtgtaaattttgatatatttatttaaattataaattatcatataaaataaatttattaatttttatagtaactcttaaaagtgataccaataataacttttgatgatctgaaaatattaaaaaaaaaaaacttacactaactataaaaattaaactcttttaatatttttttatttgataatataaagcatttcattattgtttggtaaaattaattttttttccaaattttaatttgactaaaatttattttattattatgttatataagtgaagtattcattaattttattgatgaaaaatatttttcgagagatttgatctaattttttttttttcatctgagacttcaacttgaaacttttcttatagaatcttgtccaattctatccaaattaaaccaaataatgttagcatgtgtttggaaatgcattcagtacgtaaagtctacaacaaaaaccacgtcaaaacaaggaaaattaagtagaagctatggttccttgcttcaaatgggcgtgcatcagatttgcaagcacgcataaacaaacacgttgtgtctaaaattgattaaaagaaatagctttcaagttagattggaaatttacactaagtttgcatcaaaacttgctttcaagttaaaaatatccaaacttaaatcgtttcactttaaaaaaatttaaccaatatcaactttataatataaaaaaaaattattcaaaatcaaattacaatgcttatgtaaacacagattggattcacgttaaatcatctacaatcttgttaaaatatcagctaacatgattttgggtaaatatgtacatattagattctatactaacaaaatgatttgtagtctaaaataaatttaattcagaatcaatatcttaacacattggattcaagttgaatcatccacaatcatattaaaataccagataataaacatctatatttgatttcatatttaggaaatgattcttaatctaaaattaattttaagatgaagcaaatatgggtaaattttgcaaaaattccatatactaaaatttattagccactaatttgcttctaaatttttaaaaaataaaaacaaataagtaattcacttcaaaatcaattttagtaaaaattaattttaaataattaaaataatttattttgtaaaagatcacccaattacacagtaaagtctttgataagacatttttcattccatatgcaaaatgagttactcagtactacagctgaagcacagtgaaatattacatagagcagttaattacaatattttctcaataaaagaaccaaagaggcaaacacctgctatactttcaaatatttctacactaaaaaaaccctttgcaccgtcaaatttcagttgacgttgacctaacataccagtagcattaatattcctcaagtttcaagtcaatcagtagctccaacaacacagaatctgcagaattgttcttcttttacaaacatggagcgccagctttctgcactcttatccctatatattcttttactgttgtcttgttcctgttaacaccctccttatgtccacaccactgttcattgtctcgttaaccccaaatgcaagtgtcttaatcttaaggttccatcgatttccttgatcactagaacccccacaacatttacattgtgcatggtctctttccacatcagtgaaaatattttaacttctcataatggcttgtgcccttaatacagaaaggccaaaaggtatcaaaatctaattcaattgtttgaatatgatatataaattattatgaactcctctacctatttgtcttcaatttggatagtaaaaaaatgtcaaatggtgtgaagaccacctttgataagttgaaccttggtagatctttcactacagaaattttcaaagttctaattaaatttgccttagtggacatagatatgttgatatgagtattgatgttttatggggggggggggggcacggtctgggataagtcacatgtaataaagtgtgattaattgatgccaaagggaaaaaaggatcgaccagttatcttgtactcaaaactacaactcatgacaaaagcaattgcaggtggcatgagcccaccttgtaaccacttttgcaggaatataaaacatgccaaaattcaagttaaatgctcccaaattataaccactactatcctacacaccaaccagcaatgcttttgcagcataaaagacagaaaaagaaaccatattgattccaaagaaaaagcatattttgagtagcgccatgaagctagacacatgtcccattattctttttctggcaaattaaagaaagtaaataaacatggtgtgcgaaggaagagatttaagtcactattcactaacgccagcagcagcataatagagcaaaagaagaaacactaaaaactccggttatgaagagttaactgaagaagcatgttgtaaccaaccaaccatcaagaataataataggaataatagtaataataataataataataataatacatagggcatgtgtggtttacacaagaaatgcagagcaaaattaacaacatcaaaccaaaagaaaaccttatggacctctgtttctccatgtcaatacaatccaagcacacttcttgcaatggaatgtgcttgatttgacctacttttcacagacccatttcttctgctccccctcattggagtcaagtaaaacctcaagaggccattgtcaatgttgttaggagaataccttgcactcctactcctttccaaaacaaactcatccttccccttcttcccattcacattactcggaacaccattcctcctaaaacccccaaaccccccaaaccccccaccactaccaccattcccaatcccttgagcattcctccaactcacactactattgctcctcaacatcctcccattaaaaccaccacctctaccgtctccgccccacgactccgaatacgacctctccaccccgttcaccctgctatacctatcctcatcctcatccttgttcccgccacgccggtgaataaacccccaaatgctccaccgccaccgccgccccttcttccctcccttcccatctccattcccaatcatccccacatcaaacatcttctcagaacagcaatcatcacgcatcgaattcgaccggtcgaattcgcgatcattaaagcccattctcaccccttgcatataatccaccccagcaggagccaccttagcattcccattcccattcccattctcattcccattattccctaactcatccacctccaaactaatactctttcttgctgaactagacctatcaagactcttcctcctcctggaacccgaatcgtaatagtccctagtctgtgcactcccaccaggcacactctcatcttcattcgaaccctcttccaccggaatctgcatatcagtcctcaccacatggttcaccggcaccggcacaggaaccggcgcgtcctccaccaccgacaacatcgtcggcatcctcggaagcgtgttcctccccaccaaataaccatcccacgacgcccgcggctcctcgatcgagtaccgcgggtcgtcgaacgacatccggccggcgtcgagcgagaaccgtccggcgtcgagcgagaatcttggatcggtgtcgcacgaccgccgcccgaacccgtagtcggcgatctccgactgtgtgtcgcggaattgccgcccgatcggcttctccaccggcagcgcaccgccactccgccgcttcttcgccttctgcttctgccgccacttctgcagcttcttgctgaaaaccgacgccgcggagaagaagctccccgcaaggtctttaaagtcacgcgctttctgctgcttgttgttctgagaagaatcaaggtcaatgtggtccttcattgtcttcaacccctcgtcttcttcttcaacaatagcaacaagctcttcttctttttctttatgttttagtatctcctcttcttctccaagttcttcttcaggttcttcgatttcgttcacattgagcttgggctcctccagaaccctaatctcgtctttgtcctcttctggattttcgggttggtcgaggacacgtggaggattgtcgtttagttgggggtgaggttgaacgacacgtggagcgttgtcgttttgggagttaatgttaatgttgatgtcttggtggaagagattggagagggtactgcggactctgacgtcgcaagatttacgctggggttcgaaggaggaggaggaggagaagggttcgtttttggaggcggagaaggatttggtgcggcggagttccgggaggggaggggggcggaagagggctttaagggcggcggcggcggtggaggggggtttccgggaggcggaggaggaggaggaggcggtgttgttgttggggtctaagagggcgaggcgttcgcagaggcatgagggacagaagccagtgaaggcttcgtcgggatggcgggggcaagagggacggtggggctgcggcggttgggggggattcataaccggaaatggaagaaagtggaggtttgaggtttggacatgttatgagaaatgagaaatgaagagagaaaaaagaataggaattgagtgagggagtgtgtgatttgtctgtgtggaaggatgacagggaaagaaagagagtgatgtgatcatagtgagagagggatgggaactgggaaggttgatggaactgtttgcttcctatggacagcgagaaaacaaaagtggcgtgacacaaaattaaggtttatacttgcttcagctactacaataatgtggaatgtgaaataaaataatgagttttcttatttcaaagttttttatgtgaaatgttcaataaaatatttggattgaggaaaatgcattgcaatatccaaaatatggttctggcattgttgacaaaaattgtgaaaaggaaaaatgtagggtcgggtttgtgatatacgaatttggaatttggattttcttcttcctgcattaaagtgtgagtatattttaaaaggaaaagtataggaataattacttcctcttgggctcttttatcttcaacttttgttgtaaattaagaaaggtttaatcactaaaaatagtattaatactctattgttaatgttttgggaaaacaaattattaatttgttctcttaattactctagtaaggatgtgattgaaaattacacataattatatcttgaattttaagataattaaattttgaaaaaaagaataaaattctaaaataaataaaagagtattaattaaaaattacggatttaagtcttggtaaaattgcatgtttttttagttatgaaactctgacgttgtgaaattttaatattttatcactcgcaaaggctgcaggctgcaggtgctataatcgtttacataaataaacaataaattcaggacgggggcatatatttatctatctacacgtacatatgcgcgcgttttaacagaaatttttttaattatcctctcgttattactagtactatctttttagggcatcctctcgttattatttaatgttgtagcaaacacaaaaaaaaaaaaaacatttactatagtagtagtactagtatttctctgacttggttcctttccattttgtttggtttgctgctttaacttggggtgtggagtgtggagttctatggggtcagaacttgtcactatttacagaaaataagcaatgagaggttgttgtttttactaaaggtgatggggattggggattgtgccttttgttgtatcatttttgttttcttatgttttcttttttcaatttattgatgatgaaattatagaatttttagctattgatgaaatatttactccctcatgcatttttctcagtcacctattgatgaaaaattggtggacactttccataatagtatggttgaaaaaatattaaaccaaaggctctttgatgcactttcacttttggattttaatttgattcattgtaaaaaaaatatatcatttaataatgtgtgaatacgttattaaaaagaatggctttctatgtaacaaatatgatgattggcctcttttaataacttgactatgcataaccaaatgacaatgtacaatgaatttaattgtcaatggttgtcacaataaaaaattataattttaatttatcagaaattatttttaaaacgatatttaaaatagttattataaaaaattaataaacttatcatacaagtatgtaattcttttatgaatattatatgattacatagctttacaatcaattcatatattttagaagttatattggggaatggagacagtatcaactttaaaagcttcaaaatgaaatatctaatattcatttttaacaattaaattgcataatcagattcacaattttttacaaaacaattattgactgtagtttataaatttgtgtcataaataggacaggaggatccaataaaacgtttaatgtaaaaaaaaaaaaaaaaaactaatatggtgtctttttggtaatcaatgattaaaaaaacgaagaaaaagcttcaaaacataaattaagatactttttttctttctaactgggtgaaaaaaattaaatcggaggtccccttatgaccgcatggaccagttgtacaatctataggcccaattttacaattgtacaatgtaatgtaattcaatgtatgcattatcaaaataaaaaaggaagaatatgttcagttctttccattaatttgtccccctccaactcactcctagagtgccatcttatttatcccaatataattttgttggcaaaactatcagaaaggggtaatttttttaatttaccataaatttcaaattaatattatgataagagtaaaacctaatgttactactttttgaattgaaagttataatatttattatgatttctattttttaattgaaatagtaaaatatattaaataaaaaatataaaaaatattaaataaaatcatataaaaatatatagaaaatattaaataaaacaaaaaagtaaaaatatatttatttattaaaatattatttacattttaaaaaatacattaaaaaaatatttgaattgtaaattcatttgtaaaaaaaattatgatttacaactttaaaatcataaaaaaaaacttacaactttaaaattataatttaaaaaattgaagttataaaatattttatgatttaaattaaaaaaattaaagtaatgtgttataattgtcaattcagaagttataatatcattacgacttactcatattggagtattaatttaaaatttaccctaaataataaattaaaaaaaaagttaccccatatggtactttggcctaattttgttattgttttcgaatttataacaggacgatccatttcaagatctgagttgtctttcttttttgggaccatatttttgtctggtcaccaagtgcacgagcacacaaataatcataaaaacagtatatatgaccagatcacaccatcgtaggcacgaggactatatatcataggacattaggaccagcaaagtgcttatacatcgcaatcttttcaataggcctaaccaaactaaggtgatatctgtttttttacccatttctgacccaagttccaacaacacaataccttagtagtgcaccccaagatgtagtcaataaagtgtggcataattaatgaataatttggcctcttaaatatataatcataaatgcaatcttcatatttatacataaaaaattatatattagaaattataatctccttaaatgaaattcaatatacattattcattttttttatgaatcatcaaattttttcattcaaaaataattttgtttcactcaaataagagtattatgtataaaaaaatttatcttcaaatatttaatgcaacaaaatcctccttttaaatatttaaggtaattaggtatttaacatttgaaattaagttacaatgactttgcactagatgatgttgatccacatgcttgcttagtagtaatatgaattagtttttgtttctccaccaataataccctaattcaataaaaaaaaaagtactaactaggtgtgtgtcattagcaaaccataagttaccttacagctcaatagcgggtcaccctcttcgtgatgcacatgcattcctttctctttgtatacctctccttattattaaagttaattttttttccctttttttccttcatcgtaatatttttccccctttcttcttgtttcatggggatgctttcgattttcaaagattcctgtcgagagaaaaagtgaaagtaaatcacgccatcacaatgagatttcgagagagagaaagaaagagggttccttctacctgattccctcactgccctttctcacatttcgctgtcttgctttctttttctttccttttctttttttcctttattttcccccctgtcttttactttcgtttcccctttttctttttcctgtttcaagtttcttttttttttttcggctctcttttctccaaacataaacactaaacaaaatatttagtatggttttcccacttgcctctactttgtgagcaaacaaactatatacaagctgttttaattaggattacagtttgtaaagtatgacttatgattaatctatttatataccacatattagaatagtgtttttgcatgcatgcatgttagtttctcataataatatttactttttaactcatttttcacccttttttcttgattttttctcactctttagttgatattatagttatattattttactactactactattattattattatttaacgctattttttattattaattaagtactattattattattggtacattggtaatcgtaaacgccaaacgtaatatgcaaggtacatggagcaatatgcagttttaatactatgcaatctcggagaaaattctaacaaatttttaaaacaaataaacgaataaatagcctttaaaaaaaacgaataaataaatgatgggaggtaagagatctactttaaaatagtgtagctctggtaatttctttgttcatgtgaaactaacaaagcatttggagaaaactgccattttgtgccagagtctttggttgtgtagtgtttgtgtttctgccattgccaaagatgttttgccttatgtgggtaaaagaatgggacataaggtagggattagctttagagtggtttgcctttttacatttggcaaaaacgggtacgtgtaggatatagagaaacaagacaaattaatgagccaagtcccacacttggaagggaaattactcgaaaaaatttaagtctcgtgttaactagagatagtatcaaaatggagtatattagtggaggataatcctcaccctatgagctaacttttaggttaagttagatcaaaatcaatattctaagatgatatcaaaatctatcctacatccattaacgagtggtcgatcatattattcacacattaagtccaaaagtgttggacataagagggtatattggaaaaaattcaaatcttacatcaactaaagataataccaaaatagagtatataagtgaataacaactctcaacctgtgaccacatccttgaaagcataatgtgaaagctctaaaatccccccaaacataatttcaaaaggatgcatgctttatgatccatatgaaatctctagcttccgaaacggcaaagtcattcatatatgtcaactttcagcatgaaaaaattgcttgcctgattgtttctcaccacgttctaacaataattcaccttccgtaactttttgtttcttatcattgaagtatctattgacactttcaccaacgtgttagtgttataaatgaatatgtgatttaagaaaatcacataagtgtaacttaatttactttttgtttcaccttagataattgattgtgcattcaaaacattttaaataattttttgtgttgaataaaaaaaattataacaaattttactcctaatttgattttataataaaaatattttaaatatataaaccatatcacttcaacatcaattttattaaaatcaatattatcaatgttaattcaaacatgcactaaattgatggtcacatgaataattaagattataaattagctaatgatcatgtataatcacttaaataggttatatatatatatatatatatatatatatattgattacttaaattatatatagagagaaagagaaacatgaagttacttcaataataattttttgtcctcgtcatttattttcttaaaatctaatgattaatattagttattcattataatcattacatttcaagaaaatgaatgatggagataaagagtagcttgatctctccatatgagtgtgtgaaatagtgatgaatccataaaagtttaagtaaaaatataaaatgcataatacaacgtgttttctacattgattatacaataacctatctaatataaaatgtggtgacattttaaaattaaataaaaatatactacatcgatttacaacctgattgatgtagaatatactttttatatcgattcttatttgaaccgatgtaaaaatgaatattgtacatcggttcaaataataagtgatgtaattttttttttacacttacaaatttgaattgcttctcgctctcacatcaattcctacttctcaagcccttgaaaccttatcacgccaccaccaccatcaccaccatgtaccaaatctcgtttccaccactaccacattgtatcattacactgtcaccactaccaaatcccaccaccacgtaccacgttgcgaccaccactagtttccactgatgaaccacatatgagtttttttgtctattattcccatgctttcttttttcccttcaattacatttatgatcaattgtcctactattacagtcagggccaaccctgacccctgggccttatccagaggtccgacagcacaaggcccataactaaaaggggtccaattttttttatagtcatgtaataattttttatattatttagattattttataactaaattaaaattattgttttattttatgtctatttgtattcaaattaagatgtcatatgtgattaaaaagtattattatttttattgttggttttatttttatgtattaccttcataagtccatattgaatgattttttagttcattgtgacatatatatcaatgtttgattgatctatgataatagacttaaaatatattttaaaaaataagaaacaacataaactcaaattataaatgaaaaaaactaaatgttagtgtattagtaaagaataaaaatatgaaatatttaatgcgaaatgataatttgttgatgatagacaataacgatcaaaatgaaacatttttttctgagagacaaaatataaaataaaataaaataaaattataaataaatgagtacattaaagttataaagaatgtgatgagttcctcatagctttactcaaatctataaaatttagctgggatggagatgaatttaaaaaatataaatatactattttaaatgtgaacatatcatatcttttataaggatgttgacaaagagaatcaaacctatcatccactagtcctattgtcatgcctactttatacataaatatctatattatgtaatcgttttaggaataaattgaatgaaagatgataacataaaagtaaattgaataaaaatgtatatatcattttgagatttattaaacctatgttattcgtttgatgtaagaaaacatgtaatctttaatgaaactatatgtctatttttttatattatatatatatatatatattttaaatacttaaatataaaaagacttgtgaaatctcaggacctaccctgattacactagtcaccataagcattgttcggttgttgctaccatcacgagttgagcatatttttgcaaggctaatcctacccatattgttccttcgtattgcttgttgattgcctttgttggaattttttggttgaatcctatgttatttattgatggttcttatgtcttgattgttttttatgagtttttttttctaaccataatattgacatgaaatagtccgtcaaaagtgatgactaatctttactagagtctatgagcgcacataactcatgggtcaaccatgattggcatcttagatcacttgattaagggatacaagtcactatcacttatgtcaattgttggtggtatttgttttgtgtgagtaaagtttagtgtggagtgtatgttttttatcttgttttggtcttctttgaatattcaaaagtaatagacttgtttggatatactgcatttcaaatggtaaatataactttttaaaataattttacaaagttcaaggatccaattataattttttttagttagagaacctaattaattatttttaaataattcaaaaagacctagcaattaatttaaacttttttttaatgcatgagatgcacatccgttacgttgcctggtgggtgtggaatgtgttataaagtgttctcctggcccttcccctttccccaatggaaaaacaattttcctaaaagaaattaaaatggctttttctaatgtggtttttgtcttgctctctatcactcgcctagattctggttttggcttttctttctacactcaatttactaattaatttggttggttttcctgaatctgatcgataagtctcatatccaaattgcaaatgcgacatgcacgtattattgtagcatgtggttggtgaattatataaaaaatgatataatgtatgtatatattttgaagcaaaagtagactgtgccccagccccagcttgttcgatctctttatagcgacttctctctatcttccactaagtaacagaggccaatattttcgaacgtatgaacttcttttattttttcaacgaagtgcatatttgtgttttcttgtctcttcataattgaacaactactgaagtggcgtctccgaaaatttgtgagactactactttgatctttgacaattaatttgtcctcgaatcattcactgcctctgatgtttctctatatagtttgggactagactcttttgttttactaaattttatataaatattaatatattttagaatttttttatgttttcttaaaaatagctttataaattcattcttttgtgattaacatttaaacaacaccttaattacattgaggatatatcattaataataaagaattcatagttttcatcattacggcatcgaacattttagtagaataattcatggttgggaaatattttaatactactttaatgataaaattttcgttatgcctttggctatataatagattttccagggtattcaatagcaactttgcactttataggaacatggtttgatggttttttttattgcactttataggaaaggttcggcttgattccattgaagcaagcaagcgaagattacacgaagattacactccgtgatttcgagggaaaatattttcattttcttttaaattaaaaaatattgtaaattgtgcacacattataatgaattacataagtattaagtaataaataataaagtgaaagtgaaatatattattttaataagattttttttaagtgattaatatgtttttagttcttacatttttgttttttcttcttcttatttttaatctttgaaatttcatatagtttaatttaatcatgtacttttattagaaatatgtttttaattccttcacacatattcgtcatagatttataataaattacatgaatgaactaaattgtactatataaaaattactaaaataaaaaaagttgaaaatataaagactgaaaacatattttttccttttttaattattaagtgtctataattcataatttattaagaaattactattttttcaactttataagaaagtatagaataactattttctaaaatcaatttctttgaaaacataataaacacacgtactatattgactgttttaactttatttacatggaaaaattatggatcctagtgaactctactagccagtaaagaaattacagaacaaaagaaacaatatacaaaggcgaattattataaaacacatttttattttcttaattattttacaagggaaaattgtaatcaagtatcctaaattttatcttagacacctttaattttaattttatcctaactgatccttacctttatttcttttgcaaatagatcacatacactttaatttattctactcaattttaaacttaactttcttttctttataaaaaaaagacactttgaactttaatttcaattcaattaatcatttttacatataattctttttagttaacactctaaccagaaataaaactcaataattcattttaatctcaatcattcattaatttatttattgtaacaactcgtttagccatatattacaatataataaaaatatgaacttagaagaaataagaaaaatattattatgatttttattctaagatttattttgttatattatttagaaaagtgattttaaaaataaaactaactattggttgggatttttttagtaatttaaccccaatttaatacaaaagactatttataaaaattatgaaatttaaaattaattgaaataaatttaagaattaattgtgaactaaattaaagtttgaaaattctatgtgaacgaaattaaagtttaatgtatctatttgtaaaaaatataaagtttaatcaagagagttgaatactcatttctatttctttttattatttaatgtacaaagtgacaataaaaattaaacctaaaacaccatgcatataactcaaacctcccattatgatgctaacccaatccaagtaagctaactcttttccctttgaatatacaaaataaaaactaacttcactctattcttattcttaactaattacaatgtaattcttaatccaagttctcaattctatattttctttgccttattctaagggttgtgttactcatgcctatccagaaagtatcttcactctccctttatgcactatagtctagagggtgatgttttcttagggttgtggcattgaaaacttagcatatatgctttcttgagtttctttctttctctaatttcttcttgatttcctttgtcctctaaagatgcatttgatgcgtaaaataaggttgcataaaggtaagtatatcctacacaataatatcgtggactcgatcaaaagttcagatatcataccctaaagactaattgtgtttctaaataattcaaattgcataaaataaataactttagggatgttattttgtttttgagagtgtttcaccatttgcatcaaagaaatataaattaagctaagaaaatagttttttagagagaaatgtatgaatgaagaaaaacttggattatgaatttgcatgtatccttttcttctaattccaattttaattaagaaccctagctaagttaaagattaatcactgattgcctcttaagttaatagtcatcttataattaaggtctgaaaatactcttttccctaaattaattcttagttaattggtgatttgagatttaatttagggttaaggataaattatagagatgtttgtaaaaaaagagattcatgccactagtttgatcatgcaagttttacgaatcctattgttctatgagtcagttaattatgagtagatgatcactaatatgtaatcaagtatgaattagagtgattaattccactataaaagacaagacaatataacaatacggttaactgaataaaattggagaactcaattaaaatagagaattagattacataggtagtacaactatgttaggattcgaagtttaggggtttagtcaaccataaccacaatacaactaaacatcacacaaaatgacagtgagaatgaaggagataaaaaatcctgacaaattatgacctcaattattcctaatgcagttcttagatcaagaaacccttactattcaaaattgagtaaaatataacttgaaacacctcccattttctatttattcttaagacaattaaaacaataacatagaggtcaacacaggtcatgctaaatcagcatgggccttgttaaaacaacatgggccatgttcaaagccgtatgaccattctcgagaaatagcgatgctaatgttgattattgcatatgggacaacataggtcatgctaaaccaacacacaccatgctaatctaccatgggctatgctgagagcagcaagaccattcgcgtatgagtgacattgaatgagaattttggttgaaatccagcacgaatcatgctaaatcagcacggattatgctgaaatagcatagccgtactgaaagcaacatgatcatgttggacgaaggcaccccaaattagttatttttttctcttttgacttttttctcaagtttccaacttttctactcaacggttaacatttgacaaacacccataataaattctgctaacaaaaatatataaaagcaaaataaaatgagcaaaaacaaaggcttaagcactccttcaagttcaccttcatactcataaaagcctagctagctagaaaacatgcattgacttacacagtgtcataattcaatagtaaaactgtatacaaactatttaaaaaatttatgcaatggcaattaatgaccctaaaagactaaagtatgctagaaagctaaatatctttgaaatgaattagtgataaataatggatacataaagaaatatacaagctcaatgcaatttaaatcaactcaatctatttcaaaattttaaagttgcaacctgaacattaatatccactaatcgtacagtgaaaggctataagtttaagaaaacatacttgatgtttgacagctcaaaataactgttatctaaccaatttttttagtaatcattccttggaaggtagagagggtaacttcatgtcaatggagactaattgatataattaagtaggatatgcacccaattattcttactgaacttttaaatttgttatatagttcgatcgatctttcaaaagtaaatgtagataattgttaccggccatggtttctgtgatttgttactcaaaatcagtctgaataattcaaaagtcctatatgcatgcagctcattcatttatctactatatgattctgaattgcaggtaaatccttgtggaaaagtgagaccccaacaaaagctatagctcactggtgtcaggttccactttatggaataccaaatctaatttatttgacagcaggattcattacgtgatcttcgtgcatgctgatcaaactgaaacctcttttcacttcttctctattactgttgtttccctatttgtatttttggtattttgcctaccttttaggttggaaattttctcagttcttcgtgataatctggccaatcattaagtattccaattctgtgctgtggacaagtgagataaaagtaaaagtaaaacatttttatagttatacggtgttgaatttttttataactattataattaggatgtttgattctttggtaagacttcaaagtctccggtttgatgtgatccctttaagcaatatattacaggaataaatttattttcaaaagcctcagcctttgtgattttactcgtttagctggatttgatctaaagggctaaataatataccgtgttagacaataatcccccgactaacccattattaacttaattacaattaaacattcatcaacgaaatcacagaactactagaaaaggccttcatttttttatggggtttgagctaattatgatgtttatttatgcatcaaaggatccggatttctttttattttaaatttgtataatgaccttaatcttaaatttgtatacttttaatattgcaccgcatttctttttattttattatgattttattccaaatgtcttcaattcagcggcagatctagactgagaatttaggtagaggatccacctgaacttattattttctattctcatggtttgtatgaataaagctgtttacttttcttatataaaaggttatcttgatccatatcatagactttaatttgtaccttacaatataaccacgtcaaatgagtattacaacggaaatgagttggcttcattgtgtggtagtgcatgtatacgtgcattttgtgtggtagtatatgttttgcttgaaactcaatttcccttgccctattttacttaaccattattatctcgacacatccattatctatagctgcataatagctcgttgctcgtttaaaatatattactattactattaattattattttgggattgataacagctagcgtatgttggcaatcaatgcaaatagtgtacatatagacgcgcgtgcgcatccaatccatagatttcgctgatgattgccgaggcacttatatccaagtccaatcatgttgtccaagtatacgtttggctaattattgtccataataacacaaactatttgcaccaaatatattggggtgagaatttgttttatccgaaagaaatcgaaaataaataatagaggtaatatcttatattttttctcaactaactcaactagatactcttacttattggggtgacaataaattaggggagggaggatttatcttttgtggcttgtgacttttttttatttctacatcacacaaatactttttcagtggaaataatcttatgtgactcttgttttttctacaccacacaaatattttttaatgaaaacaattttattctaatcaaataaaatcattataagtgacaacttttctttttagattttaagtaattttaaaagctttttaagtatgacacattgatctacttaagggtatacctacaatataaataatttttattgttatttatattaattgattattaatttttttaacttcagcgtaacaattaattaaggtgacatttgcaattgcggcaaggaatcctttagtatttgagaaaaaaattacatagaactagtcaaatttctttatactattatctaataacaaatttctctctctatatattatgtttctatattgtttgttgatttttataattattattttaaaatatatcaataataatttataattaaataaaaatgtacaaattatttacaattgatgactattaaactcttgatattttaaaaagtagcataaaacaaaactttttgatcatgtttggtactacaagagaatagaacattgccatttctataagtgggaatagaagtactttcccataaagttttactaaacttatttatagtaactattgtaaacacgttattatcaagaaacttcaataacaatcaaatgtattatattaattttttctagaaatttcattcataagaaagtgatttaattagaaatgaaagatttcccgatattcaatgtcacataaaagtaaagggattttttttagatataaggttggtataatgaaaaagggagaaaggaatggagaagagttcaagagtttgattcctcccgttaacaaatactaacaaatgggtctgttttaatatgcataattaaagaaaattaaatatcgttactattttaatattattaagaataaggataaaatagtctaaaaaatgtggagacaaaaaaaaaattaggtaaagttgtatcttctttatatgttgatatagattaacttttaaatcataaaaaaaaatgtttcacaccatcgattttaagaaatggattaaactcatttaccataacgtttttttataggaaatttaccttgacggttttcaaccctaattattcgattctaattaaaattattctctttgaggacatcttacaggaaaaaaaaaggtttaatctgtatgcatatatagtgtaaatattaattagttgtataccatttttttaaaataaaagttaataataatttgtatgctaattttttaacataaaatttaggaagagaagatgataataagtctaagcaaaaaataccttcaagcttaaaaaaatcctcacccatatatatatacttttatttatctcatcctgccaaacatcaaatagacaagtaaagtctcaagcctttgttgtatcacatgtgagactatgtcttatgctttacttgacgttacttttgaaattatttgtacgcactttgtttcatatattcttttataggttaaatttataataactagttgaaaaataagcactccatgtcttgtgttttaactggtttgttagttagatgtaattgtaataattgttatcttaaaaaactattatacaatgagtgagtttgtttaaatttttaaaaaataactttaaaataaacattttttatataagtacttttttaagaagcagataaatttacttcttaaaataagcaaaaactagttttcaagaagaaatagtttagacaaatacactaaaaaaaatataaagttgcttatattattaaaaataaatgtttattttaacaaaaatttaaataaattggttcaataactagtgattttaggtgattttttttaaagtagttgaaagataaattaagaataagaagtaaagtataattatcttgtattaatagttatatatatatatatgtgtgtgtgtgtactaattaaatttaaaagtgaaaaaaaactataactgtatatgtccatgcctaaatgtgcaaaaggaaaggaaatgaagcaaaagcaagaaatatcattattacaaaggaaaatttgatgcaaaagcacaacctcatgacagtcctatggtccacaagcttatacatcatatataaatcaaaggctttttagtttttgtgaataaaataccgatgctgaaaatgatagactactttaatataaccaaagcctccatcttgggcccaacatgtctgtgcagatcttcgttcacattataccattttgctccaatgaagtttactttggccaatttgatcacatgaaaacaacaagaatatttaatatgtaagaagaaaaatcttcaatgtagataggtgtaacataatggacaataatccactaatccctaaaaaaaaacataatagaccataaaccaacttatccgccgcgctaatcacgctttcgtgaccatctaattaacttaatggtctcaattgaactgtcttacaaatcgtttgaacagagattcatcttcttatccaattattaggtcctagacaatttccttaacctctgtatattgtgattgaagtggccacgattgcgcattttttgtctaattaagttgcacgagacaatttcaacaacataaattattaggtggtttaaaattatcatctcattcatcatttcgatcaataattatgttacacataaacaattaaaatatatttattaaattaaagatatactaaataactatctaataaaaattaattgtattatcccttaatttacggaatcttaattaatttaaaatattaaattatctcataattaatgatctaaaccacagataacatagtggacttgattcacttaataagttttcaattccaagatgagataaatttcttgtctccatacctatcatctagatggaatgaaggaatctaaatggagatgtagagtttagcattttactaaagcaagacaaaaagggcaaaaatgcatacaaaaacagaaatcaagggttacagatttacgaaagaatttataatttatatacagttttactgcaaaatatttgagtttaaaattataaaggaattttattctgtgaaccaaatacaaaatgttaggatgagtttaggaagactcgagtatatcctaaaattagattttaccggatgaaattaaatatttatattataatttttattaaaaataacatgatgttgactcgtgaataaatattatattctattggttgagatcactttgattgttgggtctatatgattgtagtgtgtagagttcataaaatacacatgatcatctacatggtgtcccattacacatgcgaacctttcacattagttatactacatgagcacagatgtctcctcctcattagttggactcttggaccgaataatgttgcaatctccttatcaaatgacatatacttaattatctataagtaatcatattatctacaagttacagattatctataatgtacacattagttgtaagcctaattatctataaccaacaattatctgttaacctttatctacaggttaataattatctataaatgttgttataccactgtgattaccccgacattcaaggactcaaagctcctccttattctataatacctacatgttccgtctaacccttcaaaacaccttcacatattcattcatgacctgaatattgatattcgttcacaacttgaacactctttctcccacggactgatactcagttacacactcattcatgaatacttgaacacctatacgctcaaccttcattcacgagagacatttactctcactttctcatactattgtataactgatgtacttacttgagagtgttggagtcttctccttagttttgcatgttctccctctaaacaaagttaactcaccgtctggcacacaggatgtgaaaccgccatcttaatcatgctcacctaaagtgtgcacttccgccatcttaatcatgctcacctaaagtgtgcacttccagattttgataagaataataatgagtgttttggttacaagaaaaaaaataacaacatgaattgcacgaaataatgtcgcggagcaatgtctttgttttaaactaaatcttaactaaaattattaaaatatataaattaagattttatggaaaagaatcttcgtgcagtttttatgagacttgttttcgtacttaaaaacatttttcttatataattgtatttctctttttaaaaaatcaatcaatcaatgaagaaatattttagtattattttagtttgcatttccctttttaccttattttattttgtagtttaggtcatggttatttcttcgtagtcctagttttagctatctaacatcatttgatagagagctatcactatactagtacactactggaaaataaccaaaaactaccattagaaagctacaaaataagctaaaacaaacatcctaatttttcattgataatgtaaaggggcagctgaacacaattttataacttaattgttattatgatgacctacaaatgtcatcaatcacaaacaaaaactaaataacataataaataatactctaatattttaacttcatcctataaaatctttcaatcatttttatttggctctaaagcccatcctaacacaaatcatattgaggatttaaatgaattaacataaaagtcaataaaattatcattaatgacaatttttaattagttaattgtataataattatttatattattaatgtacatactattttttttcaataatttgtacacatagatctaatagaaattctcaatatcatttcatcatattaattaggagtgacaaaacgagttggtccccctcgacgtgtctcatccgcattttagttattgtttgaaagtctcaacatgttatattttttgttgatttggtgggttgatccgccaaaacaaaatattaaaaaaataaataattttttgttttataaatattaaataataaagacttaataaaaattgaaggtattatcttaaattttaaataatgatttatttagacaaaaataaaaattaattaattaatattatttgtataaaatatcaaaataaatataattttcttaataaaaaaaatagattagagggttggctcatcccacttttctctcaaataatttttttctgccaaaacggaatgagttaaaaatctcaacgaaagctgcaataaaaaaacggattaccatgatgaattcaacctgttttatcacccttaatattaatgaataagataaagagataaaatagttactactatatttgattagttacctgtataaaaaaatgttttacaaacattcaaaataattttaattctttacaaatatgattgctgtagtcttattttaaaatattcgcagagaacttgaaaggaaagagtgagaaacaataagagataattaagaaaaaaaacagagtgaggaggtaagatgggcaatatttttggattcaaattgcgagaatagataaggaaaagaaaatatggtctttaatttctttttcttctgcgatcactttttttccgatcaattctaaagtgaagagactgatgcatacgtgctttaaaagtattttagtaaaaggttgcattatgcttgacctgcttgtattgtaatcttgatagaccaagttattcatgaaccttgtgtttgtgacaggtattttacgtaacaatttggtatattgagaatgaaactacttatatacagcgctctaattcttactataaggcgtaagtttgaaagaattattgatcttttttttataagacattttaatttaaaatttctttaaaacatttaatctttaaagtcttagttatgttttttttttcaaacaagttaaagtgagttgtcaaagaatacttttttctataggcgattcaaattcaaacttacatttctgtggtgttataaatgttaaatgacactcgttaatatttttctaacttgaatttctagtgtatgctttatttttgaaggaattttttagtgttgtttgttttaagcaaagctcgcatttcaaggcacattattcaatataattttatagaaacaaaagaatcaaacaagccttagtgataaacaacaccaacctaaataataaaagggaggaaggcttttctaatttataaaaaagtgcatgtttagatatatttattttaaaaataatttatttcatcaccttaaaaagttgcaaaatattatctgaaaaaaaactgtaattcttaaaaagacactaatttctgaatcctattattaattttttttttattattattatcgcttcaactttcttactcatgcacgtggttaatttgccatgatttttggatcacatatttgatattccacgttgtatatgttatggcaattttgcatgaggatattacttaactcactttattatttgtttttattcatcccaggtaggttataaattagacaatccgtaatataaagttatattatgaattattcattgagttgcgttaaataattatcttatgcatatctaagtacttggtactgtgccttttggagccaagtccagaagcgaagtggttgttctctgatggagaatttcgggtccataacccaattgagattggggatgcgttacatataccaccatgcgaatttgtaagattcataagagttttttttttttttttttttatgtatggattgagcaatccgtaagctcaatctgtttgttttttcttttttggaaagttagaatatattttagaaaataatggtgcatgcaagtatcgaacttgtggcctttaagttactaatacgatgttctaaccaactgaactaatagatcaattatgttaaaaattaattgatattgatatatatatatatatatatatcactaaatttatttaatttaaaatgattgattatgttaaaaatatatgtgtattaaatatacattgaaaaacttagtgttatatgtaaaatttaacatatattttttaaatatgttttttatttctacactttttgtaaattttacttttaattcttaaacaattttttaatgttttttatccttatttttgtagctaacaatttatttcatatcattaactaatttcacatatatgtaaattatatgttaaattttacatataatttacacatatgtatgcatgcattaattcaacatgtaattttaacatataatgttattataaaatttaacataataaattattttaaattaaaaataataaattaaactataaattaatagctcaattgtgttaaaaaataattaatgttgatacatataatactaaattttttaatatatatttaatacacatatatttttaacataataaattattttaaattaaataaatttagtgatatatatatcaatattaattaatttttaacataattggtctattagtttagttggttaaagtatcgtgttaataatttaaaggtcacaagtttgatacctgcatgcaccattattttctaaaatatattttaactttccaaaaaaaaaaaacttacggattgggcttacggattcatcaatccgtaagattcttacggattcgccaatccgtaagtgtgaatcattgttgactttaaccgacactttttttttgaggatgactttaatcgatacctaatctgtacttaagtggtattggaattcagacaacaatctcaagggatgtgctacatacaccatgcgaatttctaatacaccatttatgaacagtgcatttccaaaactaccctttgcttttttgcaacttttagacacggatccgtagtcttaacaaaaaataaatatggcttaactcaactgaacaagtcaacttagtaacaccttaaagaaattcaacatggaagtaggttaactattaatggtatagatagatgttatggaactcttttgtctcaacatctcgtcattaattaactggaattaatcgcagtaaagattataattaaatatttattttactggaaagatctaaatataaagagtgtgatatgttaaaacaatatgtactctcattcgtatataacagtatcgggcttgtgttgtaatgaagctaacaagcctatccctggataagcatttgaattttgcactcccactttgaatcctacacctctgaattgacaaaatacttcgtccgttttcttttgtctttttcctctagtaacacatgcaaacccttcatcccgccctacgtggccctcctccccgccctaagccaccttccacccagtccttcgatcccgcaccacccaccaccacactagcttcaaactctgatcccactttgccacccaccactataccacacaacacacatcgtcacaaaaatcacaaatcgaaacaacaccatcgtgtcgcagatctgaagctcctagtatcgactattccgaaataggaaaaatactattccaaaatagctattttaggtgtgtatatgtattacaaaacaactattctataatagaaaaaattgtttccaaaaaaaatattccggaataggattttttttccattatggaatacctattcttgaatacatatacacttccaaaacaactatttcataatagaaaaaatcccattctaaaatagctttttcagaaagaattttttctatttcggaatagttgttttagaatagaaaaatcactttctagaatagttattctgaaatagaaaaaatcatttccagaatagttattttgaaatacttatacatttctagaatggtcattccgaaaacaaaaagagggtaatttgtcttctcatgcactttgatgaggtttttgatggagtggtgaagaaatcaacgatggagacatcactaaatggcggaagaaacaaatgcttctccactcgaggtactaccatttcctcccacttgtaattaattctctccattgtagttatgtgcctttttaatgtgaaattttcccttttgttattagctttaaggatcttggtcctcatgacaatgacaagtattcggatcacatgctatctaaagttgaggtgaagaacttttcaaaaagggtagttttgagattattttaaaattagaaggtgtaggattcaaaatgaagaggtgcgggattcaaaatgccccttggacaactaatacaactagcatgacccatgttctatatttggacctccaaaaagagctaatgatgcccttgaatttgacaaattctttggataattatgttttgaataactcaattctggattgttttacctgtactcgacaattttctgcaacaaccctttatatttcataaaggttaatctgaaatataaaattacacttctgattagcctttttggagtataaaaggggtgagacttttacatttttagaaaggctaatccgaaatgtaattttacatttaagattagtctttctaaaatgtaaaggatgtgtcgtagaaaatttatgtgacataggaagaaagaactagcctcaattttaatcatgccacccgttattttttcaaccgttcctctaaaatcatccttgtgtgtgaataggggtagaaaaaaaagtatgatagactttgataagattaaacttgacttggtttataattacaaagtttgagtataaattttttacttgttataaattaatttttaaagtttggtttggcttagatccttagcctaacctaaatgtctacttattgcatgacctgttttatataagggttataaataggtcaacaagcctaattgcccaagaaagcttgtaagcttaaatagaccttcaaaaatttataattaaaaattatatctttttatattaattttaggtatataatataatataattatgtaaataaagaagtttgtctaatagtcttttttaaagtcaaaaacatgacttttttacttcaacaaatgttaaaaaagtctaagcctaatctttttgataaatgaactaggatagatcttgtcttatgtaggagaggtcgtaggtccctcaatagaatctttggttttcaccccacatgtgaacaaataatcttccttttgctcagttctagaaacctattcatttttctttctagaaaattcttcttttctctttcgactcctccatttgtaaatgacaatcatcaaactattgtcacttctttggctttccattttagtaaagcaaatccatatgtgtgtatgttcatttttcccgttcttctgtcatccaaaacaacaaaaaggatacctaatttttcaataaaacctatagaaataaattttcagttaaacatttttctacatatttaattttaaattagtgtttagcacattcagaaaataattttttaaaagcgttttcaatgtattctagatttaaatccttttcaaaatcatttttaagcattccaaacataagttagcttgacgtcacctcaatcggacattccagtcaaaagttatgaccgttcgaagttcgctcaacactgcgcaccctaacacgtgtcacaatctggtgaaacacaccctatctaggcgtgtttaaacacgcccaaatcaggcctgtttaaacacgcccaaaccaggcgtgtttgggtacaccagattcccaatttgtttggccattgcaccatttgcctgattttttaattaatttgtattatttttaattttttgccttagcttgacacgttatttctcaagaagtaatatgtttatgatcaatttttttatgaataaatttaagatttactaaaaaaatatatttaaactcaatatcattttacctcaattactattgattattaccttaacataaaattcaaaaacatatatacaagttagtagagatgacaatgagtaaggtacatagaatttgttcccatgcttgcatttgaaaaaaatgcacgatcccacacccgtaaagattgtagacattataaagaaattcatactcatgagtacctgtccaaatcctcatagactttaatggaaaaactcatttcaatcaaggtcgagatcgagctttccctaactatcaaaatcgagaatgaaggtgattatgatgatacttgtccctaacttgctttgttaactaagaaattacaaaactagccttgtatataagaatacttgttgggtttatgagatttgaaggaaccatagccatcatcttagaaaacgtgaagaagagtttggaggaaactttcaaggaagaaaatcacaagaagcactttatttttatgaagtgtacacataactgccatattggataacacatgcaagcgcaaagaaatttttatttaatttcataatcccttgttgatgaaaatgttctataatttcattgagaataactagacaatgtgtaagcgcaaagatgattgttgtcaaaagattgtattgaagggttgctaagtatcaataggatactttcacacacaaatctcgttgggaaaaatcaactttatgtcttgcaatattctttctctatttaaaaatttcacacaaggaattgctcaaataaacaatattataatttagggctttttctttaaagaatttaggttttttttttaaaagaatttagggctttgttgataacttaattaattatttttgttatttttgcaggggggatatgaatacagaatggtggtggtagacattaacttcatataagaatttgagattaatgctcaacccaacaagacgtataaggcaatcctccaaacttttccttataggttgcgttaagtgtttgcagaaatagagatattcattattttttttaaatcaacaaatgaaatatttattaaaataggataccaatggtaccaattacattgtgttagagttgtccagaggttatcatgtatttgaatcattggatattcaaatatagtataatcaaaaggatgcctaagaggatgcctttccaaaataggatactaatagacccaaaaacattcctaccaaagcctgccaatagcaacccctgtacctgagagctatgttatcaatagcggatgtcgcagctgcaattacggcagagcagacatgtgccgctacagtgggtagagtaactgtgcattttacggctgtggttgttgcgcccgcgacagggtgggtagcggagtagtctatttaatagtgcttactgtatcagcccaaaaatactttagtaaatttgtctcatttagaagtgttcttgcaccttcttcaagtgatctgtttttcctctccataacaccattttgttgaggtgttcttgaagctgaaaagttgtggttcattccattttcttcacagaatttttcaaaatgttcattttggaattctccaccattgtcacttctaattgagataattttacaacctttctcattttggcctagtttggccaattttctgaaaacatggaaagcatcactcttggatttcaaaaacaaagtccaagtaaatctagagtagtcatcaacaataacaagttcacagtaattaccacctaaactcatggttctagaaggaccaaacaaatcaatgtgcagtaattcaagtggtctagaggtggaaacaatatttttactttgaaaagagattttggtttgtttccccttttgacatgcatcacaaagtttgtccttttcaaatttgagttttggtaagtcaattactaagtcctttttaataagtttattcatatggtgcatgttaatgtgactagctctcttatgccacaacaaagtttcatctaacttactcattaagcatgtagtcttgtggaagaatgcatggtctatggaaagcaaataaatgttaccttttcttttgccaatgtggattacttctccacttttaccatcacatatcatgcaacaatcttgattaaaagagattttaaaacctttgtcacatagttggcttatgcttagtagattatgcttcaagccttcaacatagaatacattgctgatctttgtgttcaagctgtcaccaatattccttcacctattatcttccctttgttgttgtctccataggtaacatagcccccatctttaagtgtaagatttgtgagtaaggacttgtcaccggtcatatgtcttgagcagccattatcaagataccataaggaagagcttgctctaagacatacctacaaaaagaacaaatcacttcataggaggaggtacccaattgaggttgggtccaaaggggttagttgcttgctttttcttttctacccaaatacactcacccttaggtacatagaatgttcttgcaaaacattggtaagatgtgtgtcctctctccatataatagtgacaaataacaactttatatgaatttctaaagaacctattttgattgaatcttggtttcttcttcttcttcttcttcttcttcttcttcttcttcttcttctgttttggaagcacaaatgttgtcttttgaacatttttaaaactctttttgtaccccaatccagaagtatcaccaaaatgtttttgagcactcaacatatcattcaaatcacattttcctttgttgagttattccaagatatcaatcaactcattattctttgaaacaatctacatatatttctcttcttgattaaatctatactcatcaaaaactttttgcagcatttcaaatttgttactagttgtagaggaagaggcacaaatacaaccacttgatttatagcttgaagtaagtttttcattttcttccttcaagttacaaacctcagtttgtaatttcattatttttgcatgattttcaatatttttcttaagcttattgttggatttagcaagctttttagcctctttgtgcatctcttgaaaagcaaaaatagcttgatcaagttcaaaggttacctcatcttcttcttctaagagatcatcattcccttcatcgacaattgaagtaaggcacatattagcttcctctaattcagtggaggattcggaagttggagaatcattgtcctcccaagcaatataggctcttcttggctttgcttctctcttgcctttgctgtcactttgttgtttcttcaagtagattgaacattctgactttatgtggccaggtttcccacattcaaagcatgtgtagttattgtcaaccttcttgatgttgctactgttgttgtttgtattgctcttgttattttttgagaatcttttgcccttattcttctttagaaacttgctgaactttttcacaattaagttcatgttttcttcgtcttcctcatcacttgagttttcttctttttccaccttaggtgctgcagcctttagtgcaattcctttgccttttctatctgcatcttcaccaaaggttagttgagataattctaattcatactcaagtaacttacctgtaataccttgagttttaagcatgggttaagcttaggattagttatatataatcatgtattagttccccaagagagggaagcttaagaaaagcaggaggctgtgtcgaccaactggcgcgatccacgtggatctggtgcgaccagcgtgggagattcgaacctgtggctcggtcagcacggttgtggcacggtacgcgcgagagcccaaatctgggctgtggatctgaatggatggcgcggtttacatgggcatggcgttaactacgtgggatgttcgaacagatggcgcgatcctcgtggggtttgacgcggtccgcgcaggaggttaaatttgggctatgctttcgtccagcttgggcgatcagcgcggagaacggcgcgatccacacgggacttttaaatcaatttttatatagctcgtgctggacgcgaaaagaagagagaaaaggctcttcttccccatttctgccctagactccattgttgagacccttaagcttcctagagccatagatcttgatcaaaacaccttcttatggcctattctagtgagagaaacacattggaagcttgaatcactcatcctttctcttgagaaggcccttttgagtgagattttggaatccccaaggaaaagctcagagaacttgagagtgactgagacccattgcgtgggaaggacaccagagctcgaggaggtggtcctagggtcttccttgatgccgttgaggtaagaaactcaagtttctccgtttgattttgagtttgggggtttgcatgaacagtgacccatatgtgatggggttggaattagcccagggtcctgtagagacttgtgttcagggggttgttgtgatgatgttagagccttcagaaatcattattgatgaggtttgattttggctctgagttgctcatgcatagagaaaaagggctgagtgcatggttatgttgaaccctagagtagatgataaagtgctcttgggatggtatagatgttgtttatgagctgatattgggttgtaatgttgagcttggatatgataaggctaaggcatggaagtgctttgtgttagcctgagcagagccttaggagagactctggggccttggttaggtcgagagggatcctagtgagggtctgagtatcattggtgaagtgaattgtcatgtgttctgtggaaaggaattgtagttcctttcgttctaacggcttaggaccgttgttgacacgttatgtgtttgcttatgtaggacgtgagcttgatatctctagtggtggtagccacggtactggggaagccggtgttttgcttagagcagtaagctcttggtccttgattatatgtcctttgctatgtttcaccatgctccaaatggagggatggtttgatgtgaataattgtgtgtatatggaacatgaatgtggatatgactgattattagattgtatactgtgccctgtgatgggaactgatatgtgttgaattgatatgctgagaatgtgacttgaaccctttgatgagggaatgatatgtaatgatatgtatatgcttgagatgtaagctgaaccctttgatgaaggaatgatatgtattgaatgtatatgcttgggatgtatgctgaaccctttgaagagggaatgatatatatatatatatattggatgtgaatgttgtgatatgagattggttgatatgattatgagccattcagcctgtgataggcgtgattgattattagactgaatgggaattctagaattgaatggatataatcctatggtagtaggatagacgacttgagattgagtaagacctgcagtgagatgttcctgtgatatagacgtagcctcccgaacggagatgttcctgtatgcacagatgtagcctcctcaggcaattgtgttgagataggttacgagatgttcctgtgatatagatgtagcctcttgaacagagatgttcctatatacacagatgtagcctcattagaaggagatgtgcctgttatatatagatgtagcctcttgattgagatgttcctatatatatacacagataaagcctccgctagacacatgagatgttcctgctatatagatgtagcctcctccagtggagatgtccctatatatacagatgtaacctcatgtagatgattgaatcctggcatgagatgttcctagtatatagatgtagcctcctgagatgagatgttcttatatatctagatgtagcctctgcaggataggattgaatgtgatgaatggcggtatgccatgagtatagcctgattgtggtcaggtagtggtttatgccatgaacggttgtaggccgtgcttgaggcacctggttgtggccaggtggatgagaattgagattctgaggattgacggtatggttgatattctggtttttgaatatgagtttactgggattctatatctcaccccgtgtgtggggcttatgttttgcaggtgaatcctcaggaggagcagacagatcccaaggcaagaagcctatgcagggatagctgtgatttgtaaaccttaggctagatgatatgagcagatggctctgatgttttgtagtatgcctttggttttattttgtaccctataaggagttgtatgtaccgttttgtactcagacacacagaaacttgatgtaaattcaccatgatatatgtacagtgtatatgatgatggcatttgttgatgcccttttcctttattgtatgcttccaaactgcttaactctgattattattgttaatgatagtaattaaggctgggtaatgaccctggttgtagctggggcgttacattaccaaaaagagtagccatggtcatttgtgaaagatctttgtattctttgatagctgtcacttttggttgccatgctctagtgaaacacttcaaaattttgatgtttaattcctcaacatcaaaagtctttccaagtcccaaaagatgattcactatgtgtgtgaatcttgtttggagttgagatatgctttcattttgattcattttgaatatctcatattcatgtatcaaagagtgctttcttgatctcctcacttcttcagttccttcatgagtgatctctaacatctcccacatctccttggcactgatacatctaactgttctaaaaaattcatcagaagaaagagcagaagttatcatattcttggccttaaaatcatattgaacaatcctcttttcttcatcattcatctcatctcaatctttaggaatcatgttattatcaaccattttgatgggcaccctaggacccttttctattgcattccaagcacctggatcattggattgaataaagatcttcatcctattttttcaaaaactgaaattctctcttcaaacaaaggaggtctgtttaaagaagcaccttccttgaaggttatttgtgaagtattcatttttgaaagaaaatagtgatcttgagtaactttcaagaaccagctcttgatgtcaattgtaaaatataggaacacttcacacttaaccaagaaggggggtgaattggttaggcttggtaaattaaaaatttcttaaacaaaatcagagtttcccttaggatctttatcacttttgaaaccaataaactttattcaatcaaatgctcaacccaaggtatccaatagctcaaaatttagttgataaacaaacccaaacaaacaagaaaaacagaatatgatcaagatagaaataaaaatcaatagacaaaagatttatactggttcacttcaaacactataaagctacatccagttttcttccactcaacactagaatggagttccacaattgcaattttctgttcttacaagtaattacaaagtctccctttatcaactctaaataaagtacaaaaatctaaaacactattagattcttagagacaaacccactgagaacactactcagtacaacccctagagaaaccctatctctagtttacaagcaagaaacccaattacaatagacacaaacttacatccaaaatcaaaacgaaaattacagaaagattaaggagagaaacaacctaatgatccaatgattaacaatgcaagtgatggattaacacaggttgagttaacaaattaaatcagcttcccttaatcttgaatgaaatcttgcttaagattgactcacaatctcatgatcaatgtagaagtagagcaagcatgtaaaaacactttgaaaacactgagaaaggctcttagaactatttttcctcgatgggtatcaatatgcaatgttacaaaatcaagcaaagtgatttcctatttataacagaaaagcgtaacagatttaatcgattaatatgcgcctaataatcgattgttttgcttatgtaatcgattaatccaagaatgtaattgattaaaaaattcataagcttttatggaatttctataatggaacaaataatcggttattccgtcttgtaatcgattaagacagaaggtttatttttttaaaatacactatgtaatctattactagaaatggtaatcgattaaagtaggagccatatcctttctaattacgctgtgtaatcaattactaattgaggtaatcgattatctactacaaaacttagaatttaaacacaacatgtaatcggttaccatctatggtaatcaattaaagcagggagaggctattttcaggtaagcctatgtaatcgattacagtatactggtaatcgattatcccagcagatctttaaatacatatacaagcaagtaattgattactacccataggtaatcgattaaaatgttcaacaaggcagttttctaaaaaccaaaggtataataatcgattaatccgatatgtaatcgattacaatgttcatgaaagcttttccaaagtaagtgaagaacaaaataatcgattaatacgatgttgtaatcgattaaaacaacaagaaaactatttttccaaaaacctttgaaacaagtttgaaacttaacaattttataaaagccttgtgatttttattaaaccattttaagttatttatgagttagaatgaatgcaatgctttaggatcatcaaaattgtttttctcttacattttatcctaattaatctccaagttgtcctttacatgtttgaaagctcaaaactttagacttgaatcaatctttgcttatgcttcaagcagatccccctgaattcaacactttctccatcaaaggagattccagctacttcattctagattttaggtgtgatctccatagctactccattgacttgagtaaggattgttccatgcattgaaatcttgaacaagcgtagaaaacttttaccaagtcagggtaaaaggtgcctttcatttcaacaaattttgttagaccttgttgctctaacatttgtggaaactgaaatccttgttgagtaaaccatgctaggcttaagaattttagaggacagagaagctttgttgcattgaactgaagatagttcatcttatcagcttcattggtaaaccaatgatcatgcctacttactacagggttggaaggttgagcttgtgctttcctttttgaagttttaaccttcttggaagtagacatagtgaaacggtaatgggtacgaatttgaggatttaagaaggaaaagaacttcttagtataagagagtttcagagagaaatagagaacaagagaatggagtatgtggtgtgagattgcaagtttacaatgtctctatttatagacaaatttgaagataatgggcaattgagaatctaaaaatatagctattgtgaccttaatcactaccattaaggcttagattctcttaaatcgtgtttaattgcagttggacagtttcaaaactgtcagatttttgcagtaacaacttaaataattgattatttcattgtgtaattgattattttattcagaatttcactttagagaaatgatgtaatcgattaaaatgcagagtaatcgattatatcagaacagatggcttgtagaagacaaagtgtaatcgattacgatttgagttaatcgattaaagcagagtgagacagatttctcagacaagcaggacctaaataatcgattatttcgatgaagtaatcgattattctagaggtgttgagaatttggaaaataccagaaacttcatgcaattgattaattcgttgatttaatcgattattccagtgtgaatttgatttttcaaaaactcgagttgtgaataatcggttatatcgatggtttaattgattacaatagcttttacttttattttagaagcatcatatgcgcaaataatcgattatagttaaatggtaatcgattatatcaactagaattctaaaattcatactttatgaagcaaccaacatgtatttttattccaatttaagttactttctatcatgcaatgtctaatccattcataaacaaagtaagtaaacatagaaatgtcactcaacatgtactagattcatccaatattccaagcatatttcttaaagtaaagaatctatccgtattcaaaggtttagtaaaaatgccagccagttggtttttactatcaacaaactcaatcttaatgttacctttttgcacatgatctctgatgaagtcatgtcttatctctatatgctttgttctggaatgcatgattggattcttggaaatattgataacacttgtattgtcacatagaagtggaattttgttgaagttctacaccaaaatcttggagttgttgcttcaaccataaactttgagcacaacaacttccagctgatatgtactcagtttcagctgttgacaaggctacacaagatttctttttgcaatgccaagaaattaaagggcttcccattaaatgacaagtaccacttgtactatttctatccaatttgcatccttcaaaatcagagtcagagtaatcaattaaattgattgttgtaccttttggatagcaagtcccactttaggtgtagactttaggtacttgaagatccttttcactgctgtttgaagagactttttagaatttgcttgatatctagcacataagcaaacacttaacataatgtcaggtttacttgctgtgagataaagcaatgatcctatcattcctctatactttgactcattaacactttttcctctttcatctgaatctaggtaggtggaagttcccataggagttgctgcagcttttcaattttccatatcaaacttctttaacatttacatacaatattttgattggcttaggaaggttccattcttcatttgtttaacttgaagtccaaagaagaatgtaagctctctcatcatagacatttcaaactcattttgcatgctggttgaaaattctttacacaaagaatgattagtggaaccaaaaatgatattatcaacatagatttgtaccaaaagtatatctttgtttctccttttgatgaacaaggttttgtccacttctcctcttgtgaatgattgatcaagcaaaaacttgctcaacctctcatactaagaccttgaagcttgtttcaatccatacaatgcttttctcaatctatacacatgattaggatattgatgatctacaaaatcaagaggttggtcatcatatatttcctcatcaatataaccattaagaaatgcacttttcacatccatttgaaacaatttaaagttcatcatacatgcatatgcaaggagtaatcttatggcctctagtctagcaactagagcataagtttcatcataatcaatgccttcctcttggttgtaaccctttgcaaccaatctagctttgtttctaattatgatgccactttcatccaacttgttcctaaatacccacttagtgccaatagatgtgtgagtggaaggtctaggtactagttccaaaacattgttcctttgaaactgatttaattcctcatgcatagcaatcaaccaatgttcatctaataagacttgttcaatgttattaggttcaatttgtgatacaaaagccatagtgcaacaaagatttcttaaagaagatctagttgatactcccttagacagatcaccaattatgttgtccaatgataggtctcttgtgtttctccaatctttgtgtttaggtgtgactgcttcttgattataatcttctagagcttcatcttcttccagcttacttgcttcaatgtgctgttgtctttcttctttattttctgcatcattgtcacctaagacttcttctagagaagggttagtttcatcacatacaatatgcacagactcttcaacacacaaggttctcttgttgaagatcctataagccttactttgcaaggaatatccaagaaagatggcctcatcagcttttgagtcaaacttaccaaggttatctttgctattgtttaaaacaaagcatatacaaccaaatgccttaaagtgagagatgtttggtttcctccctttatagatttcataaggagttttctttgaaataggccttatgttcttcctattaagagtataataaactgtactcatagcatctgcccaaaaatacttatgtaattttgtttcatttagaagatgtaacaccccaaaatttaggaaattacagataattattaagagtaaaatattctagaaaaatttaggacaaaatgacaagaacgcccctgaacaatttcagaaatgacgtttatgtccctagggtaaaaatgacaattttgccctgaacaattctggaaatgaccaatgtatccctagatattttagtaagatatttactaggaaaaattaccaaaatgtccttagacaatttcagaaatgacaaacatgcctttgaggacgaaatgacgaaaacgcccctggatattttggaaataaccaaactgcccttagatattttagaaaagatattttagattggaaatgtacataaatgcccttgaatattttggaaaggacaaaaacacccttagatattttgaatagatatttttatgatgaaaataaagaatactcttagatgacggactattgaaaaaattgtgacagaaagccataagtggaataaggctttcttaagcatcaaatgatataaaaaaaaagaaaatttctgtttccatccctaggtgtatagagtatgtgaagatgtcaagttatggggaggttgtttgaattgcgtgtaatggagtgattctgaatttaacccgaaaacttattttagtaaaattatcattatagattctttaaccgttggatcttcctcaaattttaaagaaagcttcctaacttatatatctaacttttgaccattgggattgtgcaaataatgtctgtaacgtgagaaattaatttttcgctaagacagaaaattctagaaaatgggctgctcgcccaggcgagtggaacaggctatttttggtcgcctgggcgagtgaaggcggtgctcagcatctatataaagccccaagacacgaaaatggaggaaaccaagcctcccaacagtcccaaagcttccctaacctcctccatcacctttccacttttaaagaataaaaaccctagcattctgaagccttccgggggatctaggagcattaggagcaaaggctgtccaagaattggagaaggaagcaaggtatggggagtttatgttgaacctagtttgaataataacccttgtttgatgttatttcgctttgtagacaacatgttcaataaaatatttctaagagttgaaataattgtttagttaagaaatttaactttagtctagtaaataattaatggatgattaaattgaacttaattccatgaatcaaagtaggaattaaccgagaattagagaaagaatagttgtcattaagaaaacgactatataagctatgtttctttaaaatttagattatgtagactaagtgtttgatagaatgttacaatgaatcactaacataactaggctattttgctgtattcttttactccttattggaggtggtggtaattgtaattaattatttaacctggctgtatgttattaattaaggatacggtatgttgttgctgtaagctatttcattttgttgctgtatcttgtggtggttgataatctaatatggttgtaaattattatgttgctaaatatgaggttgctgtatttaattaagattatatgttgctgttgtatatgtggctgtatatgtagctgctgtatattttaatgggttgctgtctgtttgattttaatgggttgcgttgctatctgattaattaggttactgtatttaatgttgttgtatgctgttatgaattttatgatgttgtatttaattgggttgctgatatagctgtacgatatgttaatattcacttgatgatgagttttgttgaaattctgtaacaaagatgatttaagagtaaactgctgattatttggtgttccaccggagtgggtgggactatctgatatgtattccactggagtgggtggaattagttgatataaaaattgaaataaatgataaagaagaataattaaaccattcatgcattctcatacacatatgcctggcgggggttaatccgtggtgttgatgccttgcgggggttaatccgtggagatgtgtgacagatagttagaggaactgagtatgagcgttcagacagtgaggagtctgagctggggggtgcttcggcagtgaggaactcacgccacccatgatgatcacatgaagtgtgggtgactttcctatgcaccactatgacaccttgactgatcatgcaagttctggaccagtgattgggactatctgactgtggccactgatgatgatgattttgtgataagctgagatctcagtcatgcatcatataaaaagatgagcatgcattataaacattacatgatgaatatactgtatgaattaattcatgtgtcgtgtatctgaggtgatttaatctgtgggtgtatcccctgtgacttttatttttatgaccatccgtatatctattttcttatattttattcaaactatgattgtcataaactcaccagagttgtgtctgtggttgacacctgtgatgaccccaaatcatttgggcgagcagataaacaggaaagcatgagctgtagttgaagattgttgaagaagtttgatgagaagctgtatgttatgatttataattttctgtggcatgtaattatgataagttgtctgtattattttggatgactgcatctggactgtatatattattataattgaaccgtggtgaggaagaactatgtacgtcacaatcgaatcatttgcaagcaaagcgaaaagaattttcgtgaaaaatttatactaatctaattttaatacaaagtggacacggaattttatataaaaacaatcaagcacgggtgagtaaagagaggcgttacagaagagtccttgctccttattcaagtgatctgtttttcctctccacaactccattttgttatggtgtttttggagctgaaaaattgtgattaattccaaaatcttcacaaaacttttcaaagtgttcattttggaattcaccaccatggtcactcctaattgaaacaatattacatcccttttcattttgaattaacttggctagtttcttaaaagctgagaatgcttggcttttggatcttatgaacaatgtccaagtgtatttagagtaatcatctactatgacaagtccataataatttcctcttaaactcatggttcttgaaggaccaaataaatccatgtgaagcaattaaagaggtctagaagttgaaatcatattcttactttgaaaagagtttttagtttgcttccctctttgatatgcttcacaaattttgtccttttcaaacttaagcttaggtagaccaattactaagtcttttctaactaacttgttgagatgatgcatgtttatatgagatgttcttctatgccttagccatgtttcattcactttacttatcaagcaatcagttttatgtatgaatgcatgatcaatggacaaaacatagatattacccttccttttaccaatgtgtacaactttgccatccttgccttcatgtatcaagcaagtctcattgttgaaggtgacttaaaaacctttatcacataattgactaatacttagtaaattgtgtttcagcccttcaacataaatcacatccttgattttagttgataagttgtctccaatgttgtcttgcacaattattttgcttttattattgtccccataagtaacatatcctctttcttcaagtattgcatctgttagcatggatatgtctccggtcatgtgtctagagcatccactatttaggtaccatattgatgattttgctctaagacacatctgcacaaatcaaattaaaaagagaaatagggtccccaatttaagtttgatccaaaggggttagtttctttctttattttctcaacccatatacattcaccattaggaacataaaatcttctagcaaagcacttgtaagaagtgtgaccgtcaagcatacaataattgcaagtaggagattttgatgatttagcacgagtaaatctttgatatatgtttggttgattatgttgcttttgatacttatgttttggaggtacaaacacaagcttattttgagttctagcaccatgtttgtatcccaattcataagtatcaccagcatacttttgaacacttatcatttcatctaagttacatttacctttataatactttcttagcaaattaaccaaataactattttcagtttgcaaacacatgttttctttttctttactcagcttataatcatcaaattctttctgcaaatcattgtatttatcaaccttagagttggccaaggaacatgtacatccattctctttgtaacttgaaagaagcttatcatgttcttcattcaatttacaaagctcttcttgcaattcagcaagcttggatatatgccatcttaagtcattcttaagcttgttgtttgcttttgctagtttttgagcttcacaatgcatttcatgaaaaacatctattgcattttcaaattcagaacttacctttgattctgtacttgatgattcatctttttcacaaatggtagatgtaaggcataggtgagcttcaacttctttttctgaagaggattctaaacttgttgattcattatcctctcaagcaatgagggacaatttgactttatgtggccttgctttccacactaaaagcaagtgattgaggaggagttgttgttcttgtaggtgctatcatttcttttcttttgaaatggttgctttctgcttttattcttccttagaaacttagtaaactttcttactatgagattcatattctcatcatcatcatcatcatcacttgaatcgtcttccttttctatctttgaaggtgtagcctttaatgcaatattcttatgcttcttatctgcatcttcaccatgagttagttgagataattcaagttcatattctaaaagcttaccaaacatggctgctattgacatctttgataaatccttggattctttaatggttgtgactttaggttgccaatctcttgttaggcattttaaaatcttgatgttcagctcttctacatcaaaggtctttcctagcccaagcaagtgattcactatgtgggtgaatctagtttgaagttgtgagatgttctcatcatctctcattttgaacatttcatattcatgaatgagagtgtgttttcttgatcttctcacatcatcagtaccttcatgagtaacttcaagtaattcccacatttctttggcacttttacacctaatagtcctaaaaaattcatcggaagataatgcagaagttatcgtattcttttccttgaaatcatattgaaccattttcttttctatttctgacatttcatcccattcttttggtattgatttgccatcaacaattttggtaggaatgaaaggacttttctcaatacaattccaagcacccgagtcattcgattggatgaagatttgcatcctattcttccaaaagttaaaatgttccccttcaaacaaaggtggtctattcaatgagactccctccttgaatgttatttgattagtattcattttcaaagaatttagaaagatcttgagcaaattacaagaaccagctctgatgtcaattgaaaatataatgaacacttatgcaaataaccaagagggggggtgaattggttttacctcagagtttttaaaatttcctttcaaaatatgtaacaacgaaagtctttcaaaaaggatcgtatcttttaaaaccaaatagaaaaacaatttccttcaccaatcaaaccacttttgtgctgtgaccaatattgaaagatgaacaaaactaatacttcaagaatatcatgaaatacaaacagaaatattaaatcacacaagatttatgctggttcacctctcaacctcggaggctatatccagttttcttctaaccaaatcttggtcagagttccactataacaaatattatttctttacaagcttacaatgatctctcttacccaccctaggtaaaattcaaaatctataccctatagacttttcaaaagatcaagaaccagagatcccttcttcgttcttccctctagaaaacctttctagaaaaagctttaaagaatacaattgttatatggacaatcaactcacatacaaaataattatcaaacaaaatgagcaagcttaaggttcaagaaagatatcaccttataatcctcagctaattcaatgaaatgaatgattcaaacaaactgagaatgtatgcaaatattctttcttgatgatttctttaaccaatagcttgaacaactcttcaaacaatgagaatgatgactaacaaatcatgtaactctccatgacaataagcatctttgattttctctttaaactcagctttggtgtttttgagaactgtaaaaagtgtttttctcaaggcttggacgagtctattagaatttctcttaatgaataacatagaccaagctattctatttataaaaaaaatagacttaactaactgtaattgattatttcgtcaatgtaattgattattttaatgaaagtaatcgattattttaaccagataatcgattaaagtgtttatcaagaatatggaaatttgtcgagaacaaaataatcgattaagccatctagtaatcgattattccagatgaactcagttttctaatacacacatgtaattgattaagttctcatttaatcgattatcacagaccatgtataaaactgatcaaagtacatttaatcgattacgatcatctggtaatcgattaaaccagatcaacatgctgtgaaaatttatgtagaagcttatgtaatcgattatatcttaaaataattgattatcacagataatgtctaattctgtgttaagcttatttaatcgattacgaataagtggtaatcgattaaaatgttcataaggcaaaaactggaaagcattcacatgcatttaatcgattatatctccaatgtaatcgattaaaacagtgagaaaaagtttttataaaattttagttgcctttatgaatttttgtctaatttcttattatcatataattaaacctatttaaatgtatgtatgaatgcatgaattaatcaatactagtgaggattataaagctttaacaactgaaccaagcttaaacaagaaattacaaaagccatcaattgagtgggcatgtgaaacatcaaaacttgtatgcttcattcttcttgattccataacttcagcttcctcaaagctaacaaaaagcaccaaaactactcttaaaaaaatttactttcaaattggagaccaactcaaacatcgtcaagatagttttgatagtgaaaacatttctcacatttggttccccaaaaaagataatgtcataagcatattgtagcatgctcacaacacaatctttttcccacactttgtaaccactaaacaaatcatttgcctttgcttctcccattaaaccacatctcaagccctcgaccaccacaaggaatagaaaggagccaatggatctccttgtcaaagtcccttgtagcatttgaattcttatatagggctatgattcaccaacaccgatgacaagaagactttgggcatcccttaatcaaagtaatccacttttcatcaaaacgcatcctctttagcatataaacaagaagttccaagagattgaatcataggctttttcaaaatctaccttgaaaattaaacatggcctattccttctttttgcattgtccacaacctcatttgctactaacacactatgaaggaattgccttcctttgacaaaagcactttggcaattatcaatcactcttccaagtatattcctaattatatttgtaagtacttttagtacctctaggaagattcttgtttcgatggaactctctaataaacctcataacatcctcctttagcatttcccaaaactccttgatgaatagaaattatatccatcgtgccctggctttttgagctctcacactcccatatagcttgtttcacctctccatcccaaagtccctcaagagcatgcaattattgctattattgatttgttgaaagttaactccatcaagctttgctctttgaagattttcttccaaaaatctattttcaaagtatttttttcaccccatctttcaccctatttggttcttcaatccaaatcctgtcctcatgtattcccttcaccaaatttttccttatcttccaatatattatggaatgaaagaatttttaattgctatccccttccttgatccacctagctcttgacttttggagtagcataaattcattgaatttttccaccttccaaaactcttgttgtagatataacctcttttagatgtgttcatgtcccaagtctccttgttcctcctttaactccaacttattcatctctttaacaatttgttgttgctttgtatgtagcataccaaattcctccatattccatttctttagaaccattttcaccccctttaatttctctttatgaacaaaagccccccaaccatcaatcacttgattcgtccaagcttcctttaccacctctttgaaccgaaatcttgaaaccaaatattaagtaccctaaaaggttttgggccccaatcaaaagtattattcgtcaccaagagcgggaaattgttcgagatatatgtatctaagacattatcaacattcttgccaagctttcaaccattccttactcatcatcaccctatcaactatactctttgctttaccatttgggcggtaccatgtgaagtgtcttccaaccaaaggaatgtcaataagctccatatcatctatgaattgattgaactcgtccatctctcttccccttgtaaactaatgctcagaccaactctctctcctttcctcctcatttatccaagtggcctcaatgacctcaagagggagagggtgatgaattgagtttataaaatttttctttgttaatacactctatgtcctttttatatgataatgtatcaaaccttgattaaaaagagaaaagcaagcaatcaagatctctataaatataaatgaatatagtaaatttacaataaaagtaaagagataagggaaaagagaattgcaaacttgatttatattggtttggtcacttatgcttacgtccaatccccaagcaatccgcttgagagttttactatctttcaaatcctttacaacacaaaagcaatcttacaccttgagatctttcaacttttgtgtttgagtctctcaagaatcaagagataccacactcttcttacaaggagtgtctcatccttttcaaaattttagacaaagaatataagaattcaccctctgatttagaagaaatgttacattgaagcactagaaggtttctcaataataagtgtattgaaccaagtttttgatctagaacttgatgaatgataatgattgttaacaagatttttttcaaaagtttctcatgtatatgaagtttttaaaatgatgaatatttataggcaaaattcgtgtaaactggtaggggtcattcccaaaagatgtaactcttcaaaacacactttttggtgcaatttcaaaaaaaaaacttttatatcgttgcttttggtaatcgattacaatgattccaaaacttgaaaaaaaaaattaacgcttttaaaagaaacttgaagacttgattttaattaagcaaatggccaaatattcttattggaaaaaccttttaacaatttaacccgatccttgaatcttctaattgtttgacttgttcgtgttcaagattcttcatgttgttttgttttcgcctttttattgtttgcttttttggcatcatcaaaacctacaacattacataaccaaattctccctttttttatgatgacaaccatcttaggtagggagcaaataatataataagatattgcaatcactccccctaagaatatgcatgggctttatttaaaatttgagcaaaaatatccataaagcaaacatatacataccttatacgtatctatacatatccatatcttatcataatacctatacatatgtctccccctttggcaatatcaaaaaggcataaacatacaccgaagtaaaagatccacaaccatcataacaaaatagttaaataatagaaagagatataataaacaagttaggagtgttttgtaatttatatatttgagagatcaatgattcctagttctcttcttatattgaagaagttttccttggctaacggtttagtaaaaatatatgctaattgctttttagcttttacaaattctaaaacacaatcacctttttgcacatgatctctgaagaaatgatgtctcgtttcaatatgtttagtcctagagtgcaaaatgagtcttttagataaattaattgcactagtgttattacatcttataaggatatggtcaagtattataccctagtttgaaaattgttgtttcatccaggatttgagcacaacaacttccatcaacaatatattctgcttcagtagtggataatgctacattattttgtttcttaatatgccaagaaactaatgcagatccaatcaagtgacatgttccactagtactttttctatcagttttgcaccaacaaaatcagaattaaaatatcctattaaactatatgaggtgatctcaggctaccataaacctatattcatagtgcctattaaatattccatagttcttttgaatgcacaaagatgtgattctttaggattggcgtgatatctatcacataaacagacactgaacattatataaggtctactagcagataaatagaggagggttctgaccatacctctatatttcttgatgtcaactgacttgcctccttcatccttatccatgtaacaagaaatgctcatgggagtagtgttaactatgaggaagatgaagatatggaatcaagaagattaagagtgcaagttttgatattttacatgcccactcaattgatgacatttgtaatttcttgcttaagcttggttcaagtggataaagcctcataatcctcactaatcttgattgattcatgcattcatacatacattaaatcatgtttaaacatatagtaataagcatttagatgttaagtcataaaggcaattagattcttagaaaaactatttttcactgttttaatcgattacctatatgatataatcgattaaatgcaagtgaacaggtctgcatattgccttatgaacattttaatcgattaccattgattcgtaatcgattaaatgagtctaacacagaatcagacgtgctctgtgataatcgattacatcacagaataatcgattatctgagtcactgcataattcacaaatgcattttcatctggtttaatcgattaccagattattgtaatcgattaaaaatgcattgataagtttttcacattgtctgtgataatcgattatttaggaaattaatcgattatctatgtgtatcaggaatcacaggtcatctggaataatcgattatttttttcttgacatttttccagaatcctgatgaacgcttaatcgattatttggttaaaataatcaattacatcagttaaaataatcgattacattgacgaaataatcgattacagttagttaagtctatttttttataaatagaacaactttcactgagttgaaagagagatactttgtgaagttttcgtacaagcactgagagaatcgctttcaagagttcataaaacacaaaggaagagggagattagaaaatcaaaagattctaatagtcatggagttttacatgatatgttagtcattgtctacatgatttgaagcatttgtttaagctttttgattaaaaaagtcatcaagaaagatcatatgcatacattcccaatctggtttgatcattcattttattgatttcactgaggaataagaggtgatatctttcttgaactataagcttggttattggttgatatttgtgttgtatttgttgttgaatgttctcataacaaattgtaatctttaaagcttttctagagggaaaaacagagaagggatctttggttctagatcttttgaaaagtctataggtttagattttgaattttacctagggaggataaaagagatctttgtaagcttgtaaagatattatatttgttatagtgaaactctaatcaaggtttgattagaaggaaattggatgtagcctccggggttgagaggtgaatcagtataaatcttgtgtgtttgaatatttctgtttatcttcatattgttcttgaagtattaagtttttgttcatatcacaagattggtaacatcacatgagtggtttgattgattaaagtgaaagcatatgtgaaatagaaggtgaagaaaattgttttcataattgtttttaaagataccatccttcttgaaagtcttccgctgtagcaattttgaaaggaattttaaaaactctgaagtaaaactaattcacccccctcttggttatttgcataatagttcaatatattttcaagtagcaatttcctttgcattgtccattccaaatcttttgagaaactccttacattattttgattgattgataaatatgtcaccattggtttgcttgatttagagtccaagaaagaaatttaattcacccatcatagacatctcaaactcattttgcatgatttttgaaaaatcattgcacaaagattcattagtggtaccaaaaacattatcatcaatgtatatttgtagcaggagtatattgaaaatacaatgaaagctaatcaaacaaaccaagagggggatgaattggttgataacaaggatttaaaattttattcaaaataatttgcggaatatgtaagatggattgtatcacataaaaaccttttgatatacagaatctttctttcaaccaaaatcacccttggaattcaagtaatgtctgaaagtaaatcttgttgataatttcttaatcacccaaattcagttaatgagaaatgaacataattagaataaagaacacaccaatttatactggttcacctctcaaccttggaggctacatccagttgcttccaaccaacactaggttagagttattactatatcaaatactcttttacaagcagtttacaagtgatctttttatcaacattagacaaagatatagattctaaaaccctattagaatacaaatcaccaagatactgagaatcctactcagaatctcaatcactagagaaccctactctagcatgcttaaaaagaaactcaatgatatatttcaatacaacagaaattgttaagaacaattaaaaagataggttcaagataaacacaacctgatatctttcatgtatgaatgaatgaaatgatgttaccacattcttcaggttgcaagaaacaaattctcagaatcacaatcttgaaaaccttttttttctaaaacatctcttcaaaaattcagaaatcttgatcacacaagatgatgattgaactcagagtaaaacatgaatttgggcacttatgaaagctcagaaacttttgggtaagtcactcttgtagtgagtaaatcgctcaatgtctatttataagaaaaagacttaccaagctttataaaaaatagaattaactatcactaatcaattaatccataggtgtaatcgattaaattgactaaataatcgattaaattgttcatcagctttctggaaatgtttcatgaacaaaataattgattaaaccgcattgtaatcgattaaagcagcaacgcatgaaagtttaaaacacttatgtaatcgattacgattcatggtaatcgattaacacaaaacgacatgatttccagaaatagactatataatctattacaagaaatggtaatcgattaagtcaacaatgcatggttttcttttaacactatgtaattgaataaaacgagcatgtaatcgattaaactgttcttcaaggcttttccagaaatgtttgaatgtctttaatcaattaaacctcttgtgtaatcgattaaagcagtgagacaagctttttaatcaagtaagccttgagaacttatcattttgaaaaaccatttgatttctttaagcttaaaaacatgaatgcatgatcataagaatgcacatgctaatgaaagatcacaaggcatttaacttgaaccacttggacaaattacaaatgccttcaagtgattgggcatgtaaaaagctaaaacaaaatcaagtcttcaaccttgtttcaatctccttgtagcttcctgtaattcaacatatatcatgttcctttcgtttaatgaagaaagcagtgtcaacttttcctcttgaaaaacccttttctaaaagaaatttgttcaacctctcataccaagccctaagagcttacttcaaacaatataaggcgtttttcaatttgaaaacatgattgggaaaatcaaatctttcaaaacctggaggttggtcaacatacacttcttttttaatgagaccatttaaaaatgcacttttgacatctatttggtaaattttaaaatccatgatagatgcaaaagcaagtagcattctaattgcttctagtcttgctacatgagcatatgcttcttcataattaattccttcttcttggttatatcctttagccactaatcttgctttgtttctaactataatatcattctcatctaatttattcctaaaaacccatttagtgcctataattggatgatcattgggtctaggaaccagttcccaaacttgatttctttcaaattgatttaattcatcttgcatagcgataatccaatgtttatgaatgatggcttcatcaatgttcttagattcaattatagaaacaaaagccatattattacatgcatctttaagagagtttcgagttgttaccccttttgatatatcacatatgatgttgtcaagtggatgattctttgaagctttccattcttttggaggatcaatggttcttgattcctcttgaaatggagtttcctttttgttttcctcttccttcttttctaactcctttcatgaatataagtgttttccaaggagtctacaagatcatcaataatttctattcttggcctatgaaggttagtctcataaaaagcaacatgaacatactcttatatagtcatagttcttttattataaattctaaatgttttactgtgtaataagtagccaataaatattccttcattagatttcgcatcaaattttcccaggttgtctttaccattattcaaaacaaaacatttacatcaaaaaacatgaaagtgtgaaatattaggttttctccttttatatattttataaggggttttctttaaaaaatgatcttatcaaggctctattcataacataacaagcagtatttactgcatctgtccaaaaatatttaaggagattttagtcattgagcataattcttgccatttcttctaaatatctatttttcctttcaacaactccattttgttgtggagttcttggggtagaaaaattatgttcaattcaattatcatcacaaaagttttcaaaatacatattttcgaattccttaccatgatcacttcttatggatgcaatattaagatttttctcgttttgaataacttttgcaagttttctaaatgtgtggaatgcataacttttatgagcaagaaataaatgtcatgtatatctagagtaatcatccacaattactagaacatagtaattacctccataactcatagttaaaatattcatgtgcaatagttgtaaaggtctatttattgagataacatttttagatttaaaaaagatccttacttgttttcccttttgacatgcatcatagagtttatttttttcaaatttgagttttggtagaccaattactagatcttttgaaaccaatttatttaaatgatccatgtgaatgtgtgcagttcttctatgccataaccatgaatcatcttccttactcataagacaatgtgcatgatttagaggaatttcttttaggtttagcatatatacattatttattctgtcatataaactttatttgtctattatttttactttaaataaagcaataaagtgaattcagcaatacctaataccctttatcacataattgactaacacttaatagactatgtttgagaccatcaacaattaaaacattttttatagaggtagagggatctttaccgactctaagaattttccctttattgtttgtctccatatgttacatgtccactattcttaggagtaatgtgtgtaaatttgatgtatctctcatcatgttcttagaacatccactatcaatgtaccaactttgcttcaaaagatccttcaattcaatatcacaattttgatttaggtacccaatttccttaggtccttgaatgttagatttgtgcaatgtgccccttagaacccatatcatttttcctattgtatttccattctttcaaatgtaacaggttgatacactatcccctttctttccatagttaaaacatgttaggaattaagagctagtcatttttagatgatacaaagaaattttcataaaacttttgttgactttttcgattgtatcctaatccagccttgtcaaaaacacatctttgttttcctaatatgatgtctaaattatttttacgaaaggtaaactttgcaagagtgtttttcaaatcatttatttctttctcaaacttgttgcaagatgaccatgagtaggatttaattgcattctcatacattaagcatttagtacttgatgagtttgcatctattaatcctaagatttcatttgaaagtttaagttcctttaattatttgttcaatttttttaaaaaaattctaagtttgaaaactttcttattggatgaaataagttttgcaagtttaatcgattctttatgcaaatcattaaatgcatcttgaagtttgtcaaatgaaatcaagattggaggatgttacctcttcatgactttcacaatctgtagccatgagacttagatttgcaacttcattttcgaagtcacttgatgagtccatgtcattttcctcccatgttatgtatgctttcttttctttgagagatttcttatcaagttttttaattttctttttgtaagtaggacatttcattttcatgtgtcccaattgattacattcatagcatcttggaattggagaggatttttcacccttcaaattcttctttggtttgaaatttggtcttctttgatttcctttttttccttagaaacctgccaaacctttttacaaaaagactgaaatcatcattttcattcatatcattttgttcatcaatgttttctttatcactttcttcatgtgtggaagatgaaactttgaatgcaattcctttcttctttttgtcattttcttcatgttgagtaagtcttgtaagttccaaatcatgttcttgaagttttccaaaaagacaagagtcatagtggtcaaatcctttgattttggaatagccatcacttttggttgtcattgtctgtttaaacatctcaacactttgttaataagatcctcatttggaactgtctttcctaataaggcaagatgattaacactaccagtaaacctattttgcatgtctttgatgctttcattttgattcattctaaagagttcatgctcgtgtgtgtgagtgtttaatctatatctcttgcatcacttgttccttcatgtgtaacttataaggtgtcccacatttcttttgcactttgacaatttgatactctaaagtattcatcaattcctaaagtagatgtgattatgtttttggcttttaagttatgttgtaccttctttttatcatcatcactccacatttctctaggtttatcaattatttgatcttctatcatatttttagggatgaaatggtcattttctacaacatcccatatatctaaacctatgacttgtataaagatttgcatacgagttttctaataatcataaccatcaccattagaaataggaggcctatttatagagtttcctttaggaaagagagagtttgatgaggccataatttttcttgaagcgtttaagccttatacaagaatcctattctgataccacttgttatccaagtggcctcaatgaactcaagaagggggtgaattgagcttataaaatttttctttgttaatacactataattcctttttatatgataatgtatcaaaccttgactaaaaagataaaaaaaaaaagaaattaagatctctatcaatataaatgagtacattaaatttacaataaaagtaaaaagataagggaagagagaattgcaaactcaatttatactagttcggtcacttcttgtgcctatgtctaatccccaagcaactcgcttgagagtttcactatctttcaaatcttttacaacaaaagaacactcttacaccttaggatccttcatcctttgtgtttgagtctctcaagaatcaagagatactacactcttgttcttacaaggggtgcctcacccttttcaaaattttagacaaagaatataagaattcgctctctgatttggaggaaatgttacaaattgaaacactagaaaattttctcaataataagtgtatttgaccaagtttttgatcaagaactttatgaatgacaatgattgttaataatatcttttcaaaagtttatcatgtatataaatgtgttaaaataatgaatatttataggaaaaatttgtgtaaaccgttaggagtcattcccaaaagatgtaactcttcaaaaacacacttttggtgcaatttaaaaaaaaaaacttttatatcgttgcttctgataatcgattgcatgatgaggtaatcgattgcattgattccagaacttgaaaaaaaattaacgcttttagaagaaacttgaagacttgatttaaattaagcaaatgaccaaatatacttattggaaaaacctttgatcaatttaacctgagtcttgtatcttctaattgcttgacttgttcgtgttcaagattcttcatgttattttgctttcgactttctatatttgctttttggcataaccaaaacctacaacattacataaccacacctcacactattaaaatccccaataacacaccatgttattgtgttaaagttcaatttgcaatccttcaaaccttgccataatcttctcttttcctccaaatcgcaaggtgagtaaacattgactattaccacctcttatcttcttccaactacacaccttcttaagcaaggaatccgtttagtctaaaggaattgttgacttgaaaagcctccttattccacaaacataacattcccccgacactatttataaaagagtacttttcccgtaaaatctcatgctcaccccacaatgcataacacaattccttcttaacttcctcctttttagtttcttgaatgcatactaattggacatcctctttcttaataagctctcttatctccttcacctttagcctccctcctagccccctaatattatacgtcatgagcttgataaaaacttttgtgtgaacctttcatctgattgcatgtctacccatttttctatttttgatcccttttttccatcacaactaattgttgcaccatgccttcttttttgtcttccaaagaaacacccatagctattcccctttccaacagcttctacgtctcttgaatgtcaaaattaatctttgtagaacacgggttagggaaaaggtgggaaacctaactctcattaaaactcatgtctacccatttttctgttttttatcccttttttccatcacaactaattgttgcaccatgccttcttttttgtcttccaaagaaacacccatagctattcccctttccaacagcttctatgtctcttgaatgtcaaaattaatcttagtagaacacgggttatggaaaatgcgggaaacctaactctcattaaaactgatgttggataccaattttctattcttggttggaattgaggtcaaggttgaggatgatttaaggatttacgacaaggacggggaaggacaaatttgcctcgtactttgtcaaacataacaggtaaactttaatattcaatcatgtacccagggacggatacaggaaaccattgaagggggttgaatttttttttttttgtactttaattatttaaatatctaatttctaacaaataaatatttaatgaataatagcttttacaaactcatttattagttttaaacataaaattaaaattgtttttcatttcaaataatacaagaaagaaatacacgtgtttataaaaaaaattaaagttttgaaagattttttattctcacaaacacaataacaacaatcagatatatattagtgacaatatatattattaaaaatattagtattgttcagtattaaaaaactattatataatcagtgcttagatatattaattatcagatttattaattaatatatttattttatttttactgtaagtagtatttaattattaattattaaatattatttatattgaaaatagtatattaattattatatatattattagtaattgtgttttttttttacaaaaagtatatgattattgaaagaagttttagggaggggactaaaactcctaattgccccttgtaaatctgtccctacatgtactctctagatacctatacagggacggatgtcgtgaatcatactaatttaatgacgatgagatatgcgatttaaaacttgtcgtctactttcaggaaatattcggaatagagaacttacaataatacaacgctgcgttctccaaagattgaggaacaagaatagatctattaagagaaagatttctccgagaaaaaatatgaacagttacatccaatcacaaactacacgaaagttacccctttcatacacaagggacagccaagagctttagcctccctccctcaaaatttttaaaactatttatataattttttgtgaataaatatatgattaatagtatataataacaattaatattatatactaattaataataatacattacttctagtaaaaataaaattatatatactgattaataaatctgatgattaatacaactaattatatactaatcattttaataatatatattatcactaattataatctaactcaaaaagatatatatacttattaatagatcttatttctatatgactttccatcaattgttatgatataggctaattatgttttgtgtgttattataagtttcatttatctatttatatatctaattattaacattaattattattaacattatataacatatttatatatttatattgctaggaaatttgatgacttttagttattactatattcgatgagtttgttccttttttattgtgagattagtattgtaagtgttgtttgattgttattgtacttgtgagatcaacatggttttttaaaacttgaaaaaaattatacaacgaatacatgtatttccttcttgtataattttaaataaaaattaattttgttttgtccttgaagacaggaatgtctagctggatagctagtaggttaatcttggatcaaaaactttttccaaggtatctatggaagaaatacccctggattaagtagatcattgtgcactttgatactgatacaacgtttagccaatgtgagtgatctgtgtgcatagtgaccacaaacaatagagtcgagagagaatgctcatacctgtgagcgtacctcttatttataagggtgttacctctaggttaattgttgccacatcttgattagataagctagaatccttgattgttgggattagaatatctgtttgttgggatctccttcgatggttgttaatacaatcctaaaaccaaggcaagtgaaggaagacttagaattacacatggaagcacttgctttggtgattaaagggccaatgacaaggtctaaggctcaaatactccaagatcatatacaatccaacctcaatctcttggagaaccatggagaaggctacaaaatgctgaagttgtttgttataatcgattacaagtagcctgtaatcgattaaataccttgtataaatgttggatttgtcaatagctctgctgtaatcgattattccatcttgtaatcgattacatggaagtgtgaattcctgtgataatcgattattctggcctgattacctggttttgggagctcctgtgataatcgattatttggtgagataatcgattattttgttcatgagtcagttttcaggctgaaatgagcaatgtaatcgattaccaagagttagtaatcgattatttgcttcaaaataatcgattaccatttgaaataatcgattattaccattttgttgcagaggcgccattttcagtttttaaatagctgttttgatagctttccttggaagctacatttgtatttcatttagaacacatttgcatttcattagcttatagtttcgtggcctatataagctacatttcaacagattgtaaggacttttggttgaatgaaattagaatgcactttgtgtgtgagaggttgagagttattctcccttgttcttagtgaagaaattcttgtttcttatcaatagcttctgagctattgtggtgattcttgcaagacttattggaattcctattccatggtgtcaatccaaatccatttctgatcttcttccattgttccatttagtaaatcacaaaacctaaaaagctgtcaaaaatagagaacttcatactctgtttttctttccattgaagaattgattccattgcaaggaagatcggggcaaacaagacttgattcagttcaggagttcatcagttgttatgcacgttgttggaaatttccactctattggtcccatatccaccatgagttttctccttccacctaccgtttcaatgaaacggatttgtcagattctaatgctttctcagttacccagatagctacttacaaggaagctcacagccatcacagtgttgcttcttttattcacaaatatcgattcgggtttcccgcacagtcgaatatgatcatatccatatttatttgttgtacatgactttgcttgttttaactgttcctttgcttttattatgtcgtttccgatataggaaagcaaccagtctctacctcggctccgtcttccggtatgggaaagccagcacctcccacttcaacctctggcaacccaatcatatcaaagcagtcacggcgacctcaatctcctcattttcttgtcattctagaatcagggaaaggtgtcgtagctgttggccctgggtcaaagaagtgaaaactttcagagtcccacaatgaaaaggctccagttgctcaaacggcacctgctccaacagtcatctcatctggggcgcctgctgctcaacaagttccaaatacctcttcctccgttgcaaccgggttattacccgggtccctttgggggaaaggtatttctgaagaactcttccatgttgttcatgcgcctaaacacttcacggattcggttcccttctctgatgctgaaattcaagaacatggcctcataaagcttagtgccatgaagtgttcatccctagttcaaactttggcgactctaaagaccaagtatatcaaaacgtttaatgagcttcaagcatcccaggaggaaaccaaaaagactcgtgaggaacttcttgtggctcagaacactgctgcgaagacgaagtctgtcgtggattctctacgaaaattaaatgtcgtcaatgtgaaaaattttaaggatttgaacgcgttctatgagaagctagagaagtcacataagtagattgaggcagagctggagtatgccaagactgatgctgctaatgtgagaacccagctatcagcagtcatggaggggtctttcaataatgcccttgatcagattcattgtttaaaccccgacattgagcttaatactaccggtatgcattttaaggcttttgttaatgatggcaggttgatctctcccccttctcctcacgaagattcagtgactcaagttgatgaagatcaaattcgcaaagaggaagaggtgatccctatcaatcaagctgatgaccaagctcaatccctggcagcttgagtatggaagggtcgggatgccggttttaatttgtaattattttccttccttttggggcctttgagccccttatgaatttgtaccaaatattgtcgggtttgttctcggtttcgttttgattaacacttttaacgttttacttatcttctccttgcttactgtgtgaatttaacccttcttagagttttgatcacacgcatgaatccatactatgctggattctattgaatgatttggccaaaatcaaaaatattttttgtagtctgcataaatatccatctggtttcaacgaacagacactttatgtgcaaaaattcctttcgttttatctttgcaacgtgttccgggttatcatccctgaacttaatcccgacaaagactaattttctacatgtagaagtttgatttttaaccaaatattcctacatctcaacctgatcagggtttaaatagcatatttctctttttccaagataataattttgatgcatcatgcacgtgagagttttcactatgcccacacgtcgtttcacaacagagacaaaagtcacaacattgtttgtaaaatcacaatagagacgaaaatgcttcatttatttgcaaacaaatgactcatgatctcaacaaaggagaaacgacattgttgtcgaattacaacttgcgaatccttaacaaaggaagagaaaatcgctacttgccaaaatcacgacttattgatcctaaccaaggaaaaatagtatattgggatgaaactttggaaccggatctaaccgtaatacattttcagtttatctgcattccaggttcatttaattgtcttcccatccaaggtttccaacatgtaagctcccttgtcgagtttctatattacccggtaaggtccttcccaattggctgctagatttccatctctggtgttttgtttccaatattcgcttgtcagagtactagattttctttgttgaaggtttggggcttcactttcttgttatacttggcggctgcaagttgttttgctgctgaatctcggcaatgttccgtaacccgaattttgtccgccaagtccaactcaatagccagagcctcattgttcttttcttcttcttcctgaagaacgttctttctcctctaagatggttaaccaatctcaactggaatcattgcctcacaactgtatgtcaatctaaacagggttcctttggtggacgtctgaatagtggtcctgtaacccccacagaacgtaatacagttgttcaacccagttggaagcggcatcttgcatacgcttcctcaacccgtctacgatcactttatttgcagcctcggcttgcccgtttgactgcgggtgttctacaaaagcgaaatggtgcttgatctggaatccgaccatcatctcttggaacctcttatcaataaattgagttccattatctgtcacaatctctcccaggatgccaaacctggagatgatgtttctttcaaaaaacctttgcacccgagctaaagttatggtggtgacaagttccgcttctacccacttggtgaaataatcaactacaactatcagctactttagctatccctccgttgccttgaatggtcccaaaaaatccattccccacttaaaaaagggccatggagccgagatagacttcaattcgacaagcagagaccatattatcttggcatgcttctggcaactttcacattttttgacatgactctttgagtcagcttccatagttggccaatagtaacctgcccgaagggctttccttgctaatgctttggcctcaatgtgttggccgtttattccttcatgtatttcggtcagcacatactctaccgtatccaggttcagacaaaccatcatcggggtatgtaccctttacggtacaagttgtcctccacaattgtgtacataacagcgtcgtgcaccaatttcttggcttctagagcatcatctggtaggattcctctttcaaggtaatcaatcataggccttctccagtcttcaatagccgagattatcattacaaaactcagtttggagacttcctgctggatcacagtcctatgatttcccgaactcttggtactcactagtttcgataagatatcaaccctggagtttttccctctaggaatatgattaacagtaatttcatcaaatttggccataatttctttgaccttattcaaatactttgccaacaagggccctttcacctggtatcgcccctcaatctgggctgtgacgagctgggaatcggtaagcacctttaccttcttagatccttgttcttttgcctgcgccaaaccgactatcagtgcttcatactcagctatgttgtttgatgttgggaagtttaactggagtgattgctcaacggctattccttccgggttttcaactatgatctcgactctacttcctttgacattcgacgatccgtcaacatataccttccaaacattagtgtcgtcccctgttcctccatcagacggggttagctccatgacaaagtcggccagcgcttgagattttatagtgtgccaggcttcgtacttcaaatcaaattcgaacaattgtattgcccagttgatcatccttccagccaaattcggtttatggattacttgtcaaattggctgattggttctcacaatgattgtgtggccctggaagtaggggcaaagcctccttgctgtcaccagcaacgcgaaagctactttttctaacctttggtaccttaactcagaatttcgaagggtcctacttacaaagcaaactggcacttgggcgttctttgtctccctcaccaatactacactgactgcttcatctcccacagacaagtataatatcaaaacttctcctggttttagcttcgatagtacaagtggagaagctaagcatttttttacttccttaaacgcagcttcgtattccgagttccagccttctgtaagagtctttagggtacactttattcaaatcagtgtaaatttgtgcataccctccatttgccactgggcttcttaaccatcatcacattagacaaccacatagtgtattggatttctcgtatgaacccggcgtccagcagctctttaacatgtttctccaatgcttgtttcctttatggaccaggtttcctcttcttttgtgtcacgtgctttgaaccggggtacactgacaacttgtggcaacagaaattagggtctatcctcggtatctccgaagccttccatgcaaaaatatcttgatttctttccaggcactccaccaatttggctcagggttgatcccctattctcaagtcttctaattctcctaccggctctggtctccgctcctcgacatcttttctcatgtcaagttccactatgtcaattagttttcctgacttacgttcctcaaccttccttccgttctagtctccttgacggatccggggtggataagatggaccaccctcactatccttgaccgcgttgtagtaacattgtcgggattcttccttgtccccacagatcataaccactttgttttttctccccaccatttttatcttatggtgcttagtaaagaccagcatatcccacttatggatagttaacctccctaatataacattatactgcgagggaaagtcggccacaataaatttgactcgttctgacttaaatgcctccttggtgcctagcatcatcctaaggtcaatgtaacctttgggggtagtgttttccccattgaactctattaacattgtcttgcatggcttcaagtcaacttcatcaagattcattttcttgaatgcactccacaaaattatatccgtgcagcttctattatccacaaatatccttttaaccaggcaattaaccagggttccgataattaccaagccatcttcatgactcgacaccacgtctcatatccccttccgtgaagtatagtagagggggctccgccttgttaattttttctttgaacttaggttgttatctcactgaaagaacctcattcagatacttccttctttggctggcggtgtctcctccttctcccaaagctccacagatgacattacactcgaacttgggttctagaaattcacctccatcattattttgttttttttcttttgtcttctctatctttctcaggtacgtgggcttcattctgacccccgcctttgtatttgttcttgcgaccttgggtctttatcacatattgccttattctaccatctctgacaaacttatcgatcacatcccttaaatcccaacattggtaagtggtatgccctgatccgttgtggaattcacagaaccaggactgatctccccccgccttattgtacaatggatgaggtcgctctacctttttcatctcggttgaagctacttctcgccagatttgtgaccgggatgcgtttaatggggtgtacttttcatatttggcctaatactttcctggcctgaacttagcatccgcgtttcttccttagttgtgacccccttgctgctcccttccccttggaggtgggcttcttcttctgggacttcttttttccttttttttgcccaccgcattggcaatctccatttgttatagctctaggtacttttttgatcgatccctaaactccatcagagatttcattggatctttgtatattgactttgctagtcgggatgacccattcaatccggcagcgatgaggtgcacatgcactttttcttccaacccttgcacctgcaaggtaacttctttgaaatggtccaagtaactctggagcgtctcattgggttgttgtcttatcttcccaagtgcgaattcggacttgggtggtttcttactagtggcaaagttcaacagaaacttatgcccgaaatcttcaaaattgcggattgaccgcagtggcagtgtatgaaaccaagtttgcgcaaccccagataaagttgtagcaaaaatctgagaaataatgggctcatcaattcccctcacacacatttgcatgccaaactcatcaatatgcacttgtgggtcgtggcttccatcatattttaacaagaaagctccatcaaagtcttccaggtatagaacattgacaatttcgttagtgacgggctgttgttatgctgcccctactgtatttcctcctgtaaactcctccgtccatttttggtcgaggtgcacttgtgggtccactgcatttcggtcttccttcgcattcaagttctgaaccactactgcaggttcctgaacgtcaggaattacaacccggacttgggctatccaatttgcttccgtggtggcaatttggggtagagctgctgcttgcactcgagccgcgtttccaatatcgatctagatcaggttcacatctcaaggttgggctggacctccagcattcgctcgagatgaacccccaatctccctttgattaacgagtctcctaagtcagcccggatcacacttgtgctgcctctttggtctatattctgacttactggaagaactcggacttaactgacattttggttcacaccgttcctggttgtatcttgactttgttgtcgtcggttctcattatgagtcgaattctctatgctcctgaagcgttgctctataagctgcatacattgttctttttcacgcctcaatgcagcattacgctccttcatctagagttctaagtttatgatatctttctgcctttgcagggcatacctcttttccatctcgttcatccaggccaggattgaattgagagcgttgctcatgaggtgctcgttaagctcttgaaccgtttgagttcagtccaggtggtgaacatctatttgattgggtgggactgcccggtgtcgctggagcaggagtagaggctatgtctaaaacttcttcactcatatggacagcgtcatagtccaccggttgggggtagtgtcgtgttctggtctggagggggcagtgggttcgcctcctccaaaaaaggatttgaaggtaagtacccccttacacatgtgtcagagcgtgagtgtacagtctgattgttacttctcgtgtttaccatcgcgaacttgggatttgaaatttaacgatccccacagacggcgccaattattttgtccttgaagacatgaatgtctagctggatagctagtaggttaatcttggatcaaaaactctttccagggtatctatggaaaaaatactcctggattaagtagatcactgcgcactttgataatgatacgacatttagccaatgggggtgatgtgtgtgcacagtgacaacatacaatagagtcgagagagaatacccatacctgtgagcgtacttcttatttataaaggtgtttcctctaggttagttgatgacacatcttgattagataagctagaatctttaattgctgggattagaatatctgtttgttgagatctctccagttattgttaagattctgagctaatggactcttaatggatctcactgtaatgggacaccttattaggcccatatgctaggtccgtaacaaattttaattttatgcgtaaaactaataaataattgaataaaagccattagttattaaatatttgttagaagttatgtatttaaatagttaaagtacaaaaagttctagtccccttttgatggttttctaaattcgtccctatacctatatacccacattttacttaaatgtaaaataattaaaatattaattatagaaatttctacaattggattaaaaaatatttgtgaaaatgttattatatatttataccataattttagagaagcactgacaaaatagtctttaaaagactttttgtttatcacattctccaatattgatagaatttattggaaagtaaatataatcataagtaaaagcttattaaataagtggtgaaacttatattctaataaatcacaataataacatgtatttaaaagaatatatagtgttgttaatatttctcaaatttttaatgagtaatacaacatcttataatcttctttcaaatcttcgtcctaccgtataaaaaaaaggtattaaataaaaagatcaataaatacttttaatatcttaaaaatataaaatgtattcaatacttattatacaagtgttagaggatattggtaggataaagatggaggatgatcatattatttattttttaattccaccatagtttttaataagagaaattacttcttccagacagaaatgtataaaaaaaattgattcagaaaataagtttacatcaattaggataatcttaattaaaaattaattcgtttcaaaatgttatttacatatgtataattgcatagtaaaaaaatgttagaataaaactctaattaaaattaataatattttaaaaatgatatcattaaatagataaatattaattaaaattcacttacattttaatttatcacaaataatttgtttttcttgtatttcacttcgaaaagaatatttattactgttccacactgatttaaaaagaaagaaaaaacacaactcaagacagagacaccaaccagaacacaacgcttctgtttcagagtttgtagtctcggtcaacagttgtcattgtaacaccatacagtatcctcaaccaataagattctaactttgattcccaatccgcaatttcaacaacagcagaaacgtttcaacctgaatccctcgaaattcacacccacccacctcagaatttttggtttcacttccttccaagccatgaattttaggagcctggaagatttctgggccttctacatgaaccagcactccaaggcttccacaaggcgctggcacttcgcaggaacactcttcagcattctcttcttcttttgttccctcttgttcagtaggtggttcttgctccttgtccctttctctgggtatggatgtgccttctatagccacttgtttgtagagaggaatttccctgatactttgagacaccccttttggtccctcttgtgtgacttcaagatgttcgggttcatgctcactggcaacatggatagggagatcaaaaggcttgggaagagacctgtgctgcaagtgttttgatttttgaataagttttgaataaatattgaaagtggattttttaatgtattttttttataatagtgtttttttaattgttttaataagttatttgggtgtgtgtggatgattttgctgtatgttgtggctgaatggacccaatatgtgtgtgatgatgctgcaacttgatggagtgtggtgtgaatgattttggagagacattatagcttaataggtaagtggagctaaagggaatcggatgaatatggtttaacttgtgcgttgctgcttatagttgttgaagatgtgttgataattccaacaacctctgaggtgcaaaaataatgaaaattgttgagaacaatgtaggaaaggtcaaatggataaaagtatcatagttgaatatgttgcataaggttttaaattgctgtcctaattgtggttccgtcgtgatccttgatattgcggcaaattacaacaaatttggatgatgtggttgcaattgcagtagtgatatggtcacggagactttaaacctctttatgttgtggtcacaattgcagctgtagactgttttttaaaactttttcaaatcgaaatttatgagggaaaaaaatgagttaattccattgcataacagtgatcatcacacggccttgaagatattgctcaaaaattatgtgatgtattgcatagcacttttggactaaattgatgtccaaaatctgtggaggatcaacttgatgtccttggtatattcagtgaactaatttgtgtgtcaactctaatatagtattattattatcctgtaaaggttccttgataagcctttttatttcatttagaactttatttgcttgtttgaccctagagattcagaaaggataatagcttgcaccttgaactttatttggatgattttgcacatgtccgggcgcatttccttgattttaatgtatacctttcttataccaaagaaatttcaagtttctcttcctgctatgatttcattatttgaccatgtccttgaaagatttgataaaccactcgatttaaatcatcaagcagaagacaagatacttattctagatattcttcacaatcattgttccatgaatgaatcttttggaactattgagtgctactaattgttcagtttcaccatttcttgagtttgaggtctaccttggttaagcattctaaatattgacatgaatttaatgttgcctttcatgtggcagcacatatttcatttatttatgctttcatttcgttgctcttttcttctgtttccaaattccaagtctgtgtaggcaaagtctctagttgaatttgttgtctctagtgaaatatataagtttagtacctaatcttctgagtttctacaggatacaattcagtatgtttagatgtccataagattatgtatggtcttttatgatacttataggaagttgaagagtaacttactttatatttgttcagttgttcttatataggcaatatgtgtgcagcttcatcaacttataattttgaaatttaagttcctttgatcaacactggtgttagctaccaatttctgaaaagaagactctttgatattcaaaaatcatatatagtaggaagtgacaagataccagccaagtgaacttatcaaatgccgcatttaactagacatatgtggtacctgttgaaacattagttgctacctgctagcatttgttgcctatgattcaataaaagctttatattctcatgattttcgcagcaaattttgcttatatatgttattagtgaactaaatagaaaccaaaaatttctaaaaattcaccaattaaaaagaaactaattttacttgtagggcatggttgtcgttggtccaaagaaattttgtgtggtaatcaaatacaagttttcttgttaaatagatcattcctcacatgtgcatacaatgggatcttatgtcagtgcgtcaatcccattaatgtagtaaagcattaagtttgtgctaaatttatatattttcaaaattatccctaaaattattgagatatactttttcaaatgtttttattaattgtataaaaaatgcttttattaattgtaattattttagtctctcttatcattgatatttattgctttaatttttattggttatgtatttgaatagtcaaagactcaaagtaaggtttccaatcaccaagcacatggatcaattggcatgggatctagtgaaaaatacatgtgatttagacaaaaataaaaaggccccaaaactctcttaatgctaggcaaagttagactctttcgagcctaaaacaatattctaaaaactaaaaaaaactcataattaaatatgtatttgtgacaaaaataattactgcataaaacattctagatttgttcttttaaaaagtactaaactaaaattcaaatttggttcttttaaaaaacacaaggagaagtgttatgtaattttctagtacatatcttatcctatcatattaattgtattctttgtcatgtctacttctctttaatttttttacttcataataaatggttaacgatataatagaagaaaaaggttaaaatataatcttcatctctctattttttcaaatctacaattttattttttatattttttaattgagacattttgctcttcactttttaaaaagtcacaattttagtcctcctatttttttaatttagacattttatctctcactttttaaaatatgtgattttagtttcccttttcaattttagacttgactatgtactttttttaattcttatttttaataaattaagcttgctagcaattaaataattttaaattaaacatttgtcacatggataataaatagacatgtgtcaatcaatgtttacgacatgcatagatcaacatttgaaattggtcacaaggaccaacattgtggatttttaaaagtggaggacgaaatatctcaattaaaaaataagagaccaaaattaccaactttttaaaagtgggggatgaaatctcaattaaaaaataggggaactaaaatagtaaatttgagaaaataagagggacaaaaattgtattttagccaaaaaatattataatgctttattgatgttgtaaaatgacaatgaaaaaaaaatacttcttttctaaatgtaaaacatacttaattacacattttaccatcaaattatccttatttcatgaattaattttatcccccaagtttttaatttgtgcattttacacttgcactccaacaacactcaatcacactcacacttattggtgagttaacatgctcatacaatggataccaagacaactatgttggggtttcacaatttataattttataatgtttctaaagaaaccatgtgcgaaaagtatctcatttcgtgaaccatgcattacgcatgaattactaagggtttagaggttacctttgtagcgtactttaaaataatggagaattccctcttgatcaccaagagtagaacatgacgacacctctacttagtccacgcgagtaaaattgaagtggggtcttgttgctagccgacgatcagggatctagagcgagctcatgccatcaatgtatttttcatgggtcatgtttgagacatgcacctctttatatagaaaacatgagtgtatcttaatccctagaatatttaattagatcaaatataatctaatattctaccaatctattagatcatatttaatcaattatcttttaattaaattaaatattatcttatcaaatcaaatcatatttgatcaattaagatattgattatatcatatctaatcatttatctcttatcaattaacccattaaaataatgattagatcttaattatctaatcaaattgttttattaattaattaatctttgactcaatttaattaaattgcaccgatatgtactctatgtgtgtgatcaatataagttccctttagactaacaataatattaaatattatctttataacattaaataataagacagtgattgacatctagaaatacatcttctaccacccagcctatgggagaattggtgatctgatttcaaccttatcgcaactatatccattgtgtaatttttgtccttttatgcaaatgtcttgatcaaatacaaggcataagagtgtcgttcgcattaagtctgattattgattccttgatacttgagtgaatgcgtaatgacaaacgggttcaatatctcatattggtccatctccgcatgaccacgcttagcacatcccactctatcaagaggcccaaaaatataactcatgttatgaaggacagatgaatcatatctacattatttcatatccttccacataattcattgcatgcccaagtactacctttatgatcaccttgttactgatgacatttgatagcatagcctacaactcctacatgtagaaatgatactgacttcaagtagaaggactactattgcattatggtttccatgagaagcgcttataaaacttacataattattatgaagtcttcttatagtggatctattcagtatatatattactcctaatatttatatttgtgtgtcgacttgatatcccatattcacaacctgtgagatgtagccatcagtttacttacacaataacatcaatgcattatagtcatcctagtcaacaataatacttgactacaaatacttttagaatattgtgttattgttcaatgaatctcataattatgtcccacttgatctaacatcgaacaaaccacatattctaaagataatattatgttatacagttaataacataattgacatatctcgtgcataatatatatatatatatatatacatacatatatatatatatatatataaaccaaagtcacaatacaaaatattgtctaaactggattgaccaattgagcttactgcaacaaactaaacaaattctcttctacatctttcattaagtcatctctatcaaatgtgtaacttgttactcacatttacactccaacaaactttccctcaagtgtgagtctcttccacatgatatgttcccctttaaatgaaagattttttgtctgtcacgagtattcaatgatggcaccaaagcttactcatttttgtcaacactccctgcccttatgccattattagtaactaatatcattatgacacactgcttaacctcattaattggaagacttttgacacaagatccttacataagaatccataaccaactatacgatactgaaacactatcatactattttccttaataccccttgttaggaaatacaatgggtaaaataacgatgagatttctataaatgggcaataagaaaattacatgagtcaacttgacaccacatctaacccaaagccataaagcatacggtttgcaagtcattctcacttacacttgctcatcatgtctatatgtatcctatatttgacttctttctcgcacttgcactccaataacactcaatcaaactttattactttaaacaacttggtgcacctaatgaattttctcttgtagtcaataatcctaacttttgtacaaatattatttcaatttttgtataaatataatttcttatgggattattttatgataaacatagaagcacgtattggaattttaattttgattcaaatttatataaatgcaaattattaatatccttaaatctgacattttagataaataaatgagctaaaacgatttgagctagaaaagtattcaaaaatgttgatggaaattacaatgggaaacaaactctaagaaaactgattgggcaagaatgataatgggtgaattggtcaataatgttaatggatgactaatgaaagattgatagtgaaagatcactagtagaaattatagtttattaactgacaataattttaaaatattcaagtttaatttaatgcataagtatagataatgatttgtcgtttatttgtcaattttatatttctcaattttatatttgataatgaaatatcaaatatcacactagaagggggttgaattgtgtgttagactaaaatgtgaaccttttttgaaatggatattgttttcacaaagatatttgaatatgaagttgaaatcaaaacaacatggatcgtcaagtcataatagagcaatttaataaaacaatgatatgtggttgtcgtccattctattataaaaaatttcaaaatacaaacttgttcatccaagtgtgtcgaaatatgcttaagagaatataattaagttgaataactaaggagcaaaatagaaacacttagtttataaaggtccactcaatttgaattacgtctagttcttcttcacaacctgcaaagggttccaaaaatcaaaacttgattacaaacaattattattccactcttggttacaacaatattctcaagaccacttttgccacccttaaactccctctgagttgaaaaatacccaagtgttgtttaacattaagtcactcatggctttcacaaacaacaaagatttgaatgaatacaaatattcaactctcatagagaggatatagcaatgtatagtagattacacaagataactttgcaaagcaaaggataacaaattaagcttgtatagacttcgttagtgaattatgtagagcaacaacacttgagagaatatgatagcttgtaatgtttcttcgtgctttattcttaggcttgagatctttatataggcttcagaatagtatctattgtggggttagagagtcttcctcaaaaaatttcgttatcacacaaattttatttttgttatatggcaacttgtaagaggagagagaggcgacaatagtacagtgtgtttgcagctcctctgctccactacttgtactatttgattctttgtttgttgtgatattcttctattttttatttgccttagtacacttgaacttcaactattactaattcaaattataagaggcaaaatgaagtcattaaggtacgaatgagaatattttccctcgtgtaagctaacatgagttcagtacaaagatggacatcatttttgcttaatataaaacactagtgaaagtaaatatgtccattggacgcgcaaagcataacataatgtgttgacactggttttcacaaagggcttgacgtttgttttataacaacgcttggatactaaatttagttattaataaaaacaagctctagttacctttggatgattaattgtaaaagcctaagaataggaatatattactatgagctttgtaccaagtatgtcttgtttcacttaacataactcaatagttcaatcaaaaatttatatctttttcatcatcaaaacattggttaattcttgggtcatccaaatataacatattggaccatccatatctaacaatactccctccatcccataataatcattgtttaagaagaagaaaaattgttcctaaataattgtcactttagctttttaatgtaactttaaaattacttttttccacttatatccttattatattaatgatatgtcgtacaaaaactaaaaatgaattaatgatcataaggttaattttgtaaaatgtttattctctatcaaccatttattaatttctcttggtttgtgtaaaacaacctatgacaacaattataatggaatggagggaataaatcattgttttttctattcattaaattagctaatttgaaattatttgttgatggacagtcaagaggaaaaggttttatcgatgtaggtaagcttaaattttttttattagtatgtaggtaagcttaagcttaatgtccttgaagaaagttatacaaaatttcttaatataaatgtaatcttcaccaatgttatcaaacccggttcggaccgggactcggtggcctaactgggctggttctgctttcagatcggttatgcagttgacctaagttgacccggtcaaactcgactgggttggtcaccggatcccaattggattggtctgacctagtcggtttttttaaaaaattgtttttttaaaaacaaaattagaaaaacaaattggatttttttaaaattttggattttggaatatggatggacttttcttactcaaataatgttagttatatacttatatatacatatataattttgaatttttaatatatactggatcaaaatgggtccattactgacccaccgattgtatcattgacccactacctcgaccgggtcaatgaccggaccgagtcaatgacccattacttgaagtggaatattggcaatggtttttctatcagtctttggtttttagccttggataaactcatcacaaaatttcgatgttacaactcctgctccccacggccttgagacactaactgttggggatcttatagatcatcaaagacatgagatgcaagctgattttattgaagtaacattcaagcattcagatgcacatgctattcaatatattcctctcattaattatctgataatgatggaaattctccctaaatggttcctattctgttaaaaccgcctactacaacatcatagaagccatgttggacaccgaacacttaaaagctaatgggaattggtcagcagtttggaagttgcatactcctcccaaaattaaacacttcgtgtggagatctcaagcttagaggttgtctgccaaataggtaaagactactttcaaaaggagttaactgtaatcctcaatgctattgttgttcacaagtttatgaaaaagaatggcacttctatcacatgtgaaaaatccaaacaaatttggataacagcaaagctttgggatgtcatccaacctaagatcaaaactgctgaaaactacaatgattttatcgtcaaccttctcgagcaactccatcctcataaggcaaatcaattagctatgatcctttggtgcatatggaaaactcgtaatcaaaaagtctgggaaaacgttgaaacaacttcctccattgtcgtctccttggcgcttcaatcctactcaaagtggttatctgccgatgcaagcaacaacatttctatttcagcatctccgccttctacctcccaacaggtatggactcctccagcaataggtcttcccaaatgcaactttgacgcagttattttcaaggtcagaatgtgtttggtatagggatgtgtcttcgtgatgacaatggaaccttcatcgatcaaagccaaaaccaagccctatccaggaacacctcaaccgcaggaggctgaagttcatgcactccatcaagctctcgtgtggattcagcaactcaaaatgataaaagataatctggcagcaacaaaatgtagggcttccctctcctccactatccaaaactctttgtaaatttaattaggaggcaagctaattatgttgctcataagatagctagggcatttagattttatgataactcccatgattttaattgtattctcacatgtacaagctatcatccttaatgaaattatatgatctagttttctctaaaaaaaaaagctaattagataactccaaccaacatcaaaaaattaaattccattcacattcattttcaaaggttcaacagtcaaatgaaacacattttctaatattcaatggtgtttgatcaaacactccaccaaatcatccttaatctaaattaatcctaggattttaatgtcaaacttgtttaaccttctattaaagaaaataaccaaaaacatccgagaaaccacgtgaatataattaagtagtatacattattgtcccaaaataagttgtgcataatcacgtgacatctagaggttttttttcatttgttttcaacaagttcaattttaatactagcataaaaaaatataatctaataaatattcaatgagaaaaatgtgtttagagtaaatacatttgaatttgctcaagatgcaattaccaagtatataaaaaaaagaaaaaaaaagtatttaacattcgagaagtgctaggaatacaacacactcctcctaacacttttcttgattagaatttattgaaaattataaaatcaagattgttaaatgagatataagaatcactaaattgtgattttcaaaaaatttcaaacaaaaaagtgtgttaaagaatatatttctaacattagagatgtaagtggctcgggttagatcgaattttgtttattttttaattcaatccaactaaatttaattaaattagattggattgaatatttttttttctttttgacaatccaattcaatctagctttaattggattggattaggtattggattgagtcattaaaaaattgtcaccaagttttgagaaaaaattttaaaaaatcatcaaactcaaaaacagtaagattttatttgatagaaaatgagaaaaatatttttcatacgataaacaataatcattaataaaattcaataatcataaaatataacattattttacaacttaaaatacttaaattaacaataatcataaaacataataatgtacaaagttagattggattaggttttgatcagattcaaaattccaaacccgtcactcaacacaattataattgatttcattaaattaaaatcaatataatctattaactcaatccaatccacaaaaatctaattgaattagattggattggatgaattcattgattgaatccaatccaattacccccaacctagcatttctcttaagattttagttgatcatatccacttcatattattcccacgtcagaactgagcctgtaacaaatcggcatacacaataacaaaatctggaaaaagtcaaactcggagagaactgtgtattaattataaatatctatcaataatggaaaaaagtatatgtaactcggttaaacatttcagtatcagattacactgcactacaacatttaagggcaaaatcccgacattaagttatcattcactctgttgcaatcttcgactatctcaaagtaatctcaactttagctgaactaatctttcagcctgtaaaagatgctccaactccgtgatcaaagttcaccgcagcacccaaggcataaaccataacagattctactcaatttgacataaaaatattcacattttctgaactgagtgatgcctaatatgtgaaatagagtaattatcattaatcaatgttccttgaaaaagatggcaatggcattgagccttgtgggcgaaggattacaagcacaccaaacatcccaagcattggaagaacaagaagccacttcaacagtttatagtagtgcatatggaatgtaagagagaaatcatcagagaaatacagtccatttctgtcaaccatctcaaccaaaaccgttcccgtggtccttaccgacacagttggcagcttaatccgatatttaccaggttgaccataggtattgttcaactttatcgttctctctccttggtaattaccaggtactagcaaggaagtctggtgaatttacacggcatgaaagaagaatgaaacataaattgaatgcttcccaaataatcagtgatctaaagaaattaatttggttaagaacttacagtgactttgtacggtccttgatgcccagatgggtatctgtagttatctacaatctcaatttccacccaaaagcttttgccttcctcatcgcggaatgccctagaaggatgagtagcatagataccttcacgactgtaacgatttgcaaaattatttcttccttgactaggcaatctccatgcctgaaacaatgtataaagccattcagtaacaaaacccaggttttttcaacgatcaaatttcaaacatatcctgcctttaggggatgatgaggagatggggttgagaagcagaagacattgccattcatagttgtgacaattagatcaagatcatccccaccatcaacattgtctgccaagaccatgctatacctgtaaaaaatggcacataacttcaagaaagtagaacagaaagcataccaagagacaacagttaaagaatctcttacgaagtttcaccaatgtcaacaacatcagcacatccagtaggtccatcaatgaggtacaaataaccatcaaatgatgtggtaacaatagttaatcccttctttttctccttgtgtttacttaaatcgactagaagaacttgattcattattcttccatgagttggatatggataccgcccaatagatgacccatccctgccatcaagaacatgaatcttcccagatagtgttggcacgacaagctcagtatgaccatccccatcaacatcaccaacagtaggaccctaaggaaaatgagagacattctcaatcaaactctggacaaatgaaccgcctaaatggtttctaatgcaatgcaaatgtgtgaaaggagtgagacagatgatcaaattaagcaaacctaaaaaacattaataggctcatatgaacataaaggtccatcacataaaaatagctggttttttacggccggttctcaacccctgacgccaatcctcctcctttatcctggcttgggacaggccatgcatgcaaacacacataggcggagtttttaggttcatatgaacacattgtctaaattaaatctaatgtgcaaattacctacataaagtgatattcacttgagtattctataatctatcatcagcaacaggaaattatgtgtcgtaacaacttggaagcaaaggaacagaattcaaaaagtaaaattgatagctcttgaggaatactgtgaagacctagactaaaaatgtttcattgactttgttcatttgtattctgataagataaaaggacttggtctattgaacctttggaagtccaaagatcactttaagatcaagtctaatgttgaagggaagaatatatgatgaaattagaagcagtcagcagtacctcttatttataatcatttcagattgatttacattaaagagcaacaataataataagaaatgtaactccccataaaactaatagccactatacatgaatctgactattccactatcctagacattatttcctaggaatataaacagtttccaacccattccccctcaagcttgagcttataaagctttcaacttgttgggatagaagtcttgaacttttgtttttaaaatgttttatacttttacagacttcatcattggtttatgtcagctggtgcctgtattattagtattttttaacagtattgttgaagaaccgtagttttcaggtttgaggaagagtaaatttgtcaatgttttctgagtggatggtttcgttggaggccatcacattgctgcatggactcttctattattacatgctcaatctcttcatctttaaccctcttttcatcttccaacacatccacgagaatgcctaaaaccaaagggaagtcttggcattctgaatctgcagataattgttcaagcctttattaggaagaggtagcaagagcatcgtgggttggataaggaacgttgtagaaaatcttgattatttccgaagaagctttcttagcctatgagtattgaggttcccaatgaggttgatgatctaataatacctcaatgtaagaaacactttgaacagtctggaacaataattatgggtttgggcttttgtcacatattcttccgtccccagatgaaaatagtagaaacctcttctatttttccatgttgaacagtggatgaacaacactgcagtaaacaaagcatacagatgaacagtttgctattaacagcaccatgaacagtttgctattcatacactatttgcattgttgttcatagcaattgttcatccgcatgctttgtttaatgtggtactattcatccacactgttcctcaatatgcactatattcaacatggccaatatagaagaaataataggtttatactattttcatgagggaacagaagaactggtaatgaagcccaacccagagagactgcgactattttcaacacagttcaatgtttttctcgtatcaaggtattattagagcatcaaccatattcgaaacctcataagctgtaaaagcttctttgaaaatgatcaagaatttctacgaagttccatatccaacccacagtgctctcgctaattcttcccatatcaaatatcacataatatcgtttcttgggttcaacaactcttcaaattaccttctgatcctgaatttgcagatactgcatgccaagagttccgtttgactttaggcattcttgtggatgtgttggaagatgaaaaagtgggcagaagatgaagagagtgtgcaataatagaagagtccatgcagcaatgtgtcacaatgattccagcctccaacgaagccatccactctgacgacattcacagatttactctttctcaaaccaaaacctgctgttcttcatcattcatcaacaaggctgttaaaaaatactaataatacaggcagagctgacataaacagaaggaaagaaataaaaagagaaaacattcacagatttactcttcctcaaatcgaaaaactacggttcttctccatcattcttctccatcattcgtcaacaagactaagagacaaagacagatagaattttttaaaaacaaaagttccatacttcgagtcttctatcccaaccaaccaacccccccccccccccccctcgcacttggagattataagtaagcttataacgatataaaatttgctcaaaaggaagtgaaacaaacatagaactggagtgatacatccacttccccttatatgtttttctctacctttcatctttaaaattcaatattcatcattttgacctgtataattacagtctacattcattctgtaattatcccatcaatttaagccattttaaaaatcctatatcatagatattgattgctctgtacatacaatgcataaaatcatgcaacattcattaatgctaaggaagattgtgatagcaagttacctgcggaataagactctttagatgtttttcccatattaaatctccttttggagtccatacagcaacatttccatgtgtatcagctgtaactagttcaatttttccgtcatcattaacatcagccgcaacaacagctccttgaatctcagccatctcaagaggaaacttttgtctaaccttacctatttgagaaaaacaactactagcatttaatttaccaatgtatagacacatgtagccaaaaacccttgattcaaaatcttgagttttgacaaataaataatgacacagataaaagaataacttgcaatcaatgaaatcgtaagctgaaaattaaatgcattttcagtccccaatcttacaatttcagagcaaaacatgtccaagtccaactttgcaatgcaatgcatcattcagtgaggaaacagcaataaagcaaagcagaaaagggagggaaaacaaaggttcataaaaatgatagacatcttccaagggaggaatgattggacatgccagagaaagaaatggccttcatcttcttaagagtcttgtgtaccagctttagaagaaaaccaatctcattcattcatgttagagtctcaactgtcaaaaaaagaaaaaattctactttttcattattgactaggacatccatattcaaaatagttttgcttctctcactctcttcttaacaaaagacatgactaccagaaatatttagagagtaaaatcaaaaaataaggtaacattaacatcaataattattaacgaaataaaactgagaaaatcaatgaagacaacatagaaacctaaaagtttttaaaacaagagaaatggtaaagaagcagtccctagacattaccatgatgatccaacacataaaacaggccaaacaaagttccaacaagaatgtcaagattcccatcaccatccaaatctacaacagttggggaagaatatatgtaggctcggaagtttgaagtatctgtactcagatcaagttctgcagtccatttaacttgtttcgtatccagattgaaaacaacaataccaccagcaacatatttcccaatgtcaatatcacccagttctttccgatgctcctggttgtcataatacctgacagcttaaaaggtggatgattactgacagatcactaaatcaacaaatactcatctgtagatgcagacataccaatataagtaagaaccagttattggtataaaatagtcaaaaagaataatgctccaaaatcttctcaaaaaaagttgtttagtaaaaataacaagcattcccagtatggcgaccaaataaatgaagcagagatgattgaatagtaaaataaaatagtacgatgacttgacctctcaataaatataagtaaaaaagaataaaataagtttcactgatgttcttttttgcacaaatccattatctggcaacacatttcatctccagagcttaaatacatgtgacttttattcatatctgaagtaataagtttattaagaacgcaaaacaaggtaatctttatcatagtagctttcttttgttttataataacatcattcctttgcccagttggccacaacttcatcttatagctaattcttgacagacaaaatcagaaagaccttcttaataattatattaatctttctatcaaaaacaataataatacatttttcatttcaagttatctgataatgtaaaaagtcaccagggggtgccagaagcccagaacacccttcacagaattgggttccgtccccatattgtctgttcatacggattgagttgaagtcatttatactaaatctatttgtctgcaaataagactgaagtgtgtagggagcttttttttcatctctttattttacaatgatacatatctgggtctcataggtgtcaagaaaaaaagtaagtgacaaaggactcgagcaactaaagaactattaagatggttattcaccttcctcaacaattttaaaataaaaaaaaaggtaccaggatgcacatattgaatgacaacaaaagagctgtacagctagcaacttatttaaccatgaaatttgaataacataattgtcacaacagaaaaaccaaataaacatataattgaaatttataaactatgtacagatggactcactcgtgatcaaagaaataagaaacggaaacaatcatttctgaaacaccatcattgtcgatatcagcaatgacctggcaaaggaaagaagatgactatatcgacaagacctttttatactttttttcttacaactaagcagaatgaagatttaataaattttatcataataaaaaggtaaagcaggaactcacaggagtgcacaagatgtgagagtcaacattcacataatcttctagtttttcatgtttaacttcggtaaattcttcatcaccccacattgtttcatcaacataatcatcataatcataattatattcatcagccagatcttcactattacggaataactcaaaagatgaatcagcatctgcctccaggccttcatcattttccacagttgcggcatgaataccctctttatctttggatacagaaccaccttgctctgctcctttggaattgttatcttccagaagacgtctctgagtgatggttttattatctgtgtgaacagtttccagagacccagcattcacagaggaattatccacaaccgttggcaccttaatactctcgtctagttgagttccatttattttcttttctggctcaggattaggcaccttaataatctcatctacttgacttccatttattttcttttctggctcaggattaggcaccttaataatctcatctacttgacttccatttattttcttttctggctcaggattaggcaccttaattctctcatctacttgactaccatttattttcttttctggcttaggattagacaaattttttgtctcaaggtggttttctgttgatgtggcagctgaagatttggcttcatgtctacttccattcatttctacaaggagaattattacacaaagataaaattaattaattaattaactaaatgtacattttacaacacacgaagcccaaaattgtactcaagtgttgaaccctatgactgtgattaaagccaagtgttgaaccctatgactgtgattaaagccattttactaggttgataatgaaaataagagaatctctgaacccacttacacaacagtgatttgagtagtaagcaaagcagaaacttacgagacatagaattcttgatagtagcatcttggacaagttggtcatcatgaacatctggatgagaacggtccactgggtcaggatccaagcccacaaaccatttttttagcaccttcctacgcggaacttcaagcttatctgacatcatatagcccgaaaccctaaaattggtaacttattacaaccttgataaaagcacctcaagtaatgggtaattgttaatggaagcaaaattttgaaaatatggaaaaggaaaaaaagtcacctgaaaaacagcacttcaccatggtaggttgccaaagctatttctctcactccatctttgtcaatgtcatatagaagaggactagaatgcacagttgattggtggaaagcaggccatcctaagaaccgttcagaagattattttttataaaactcaaaatcaaacctaagttaatcaatcaatcataataaggacaagctttggtcctaagcattaacaatcagtttatacaagtctgaacagtgcattaacattgatccctttcagtattccctccccaccaccaccttacgcagcaatagtaatttattatcgttccttaagcaggagccatgaagaattctaggccttattaacaagttacaagtgctggggacatgcaaggtcaaatctgctttcagtgtaaagaacacctaagcccgtgtggctacattatattttattgccaacttttacatatctcaagcccagacaaaagttgagggttgtgttacgcaactggcaaccaaaacaaaactttaccaactacttcagattatgaacaatttaatattctaacggtatgtcattaaccatgtgtaatgcaccatgtagctcaagtaagatgttacataagctacagctactacaatagcttccagaagtggtgcaaaataggcacaggccaattccagtgattagaataagctttagaatcttttacctctctctctggttacataagatctgtaagtactcaccttagctactcattagaactgatcaaaacagtttgaagttcttgaatgaacaaaaacttttgaatgaagaacaatttaagtgggccactaaattgattggttatgattttgatatttagtacaggccagggaaagagaatatagtggttgatgcactttccagacagttttcttcttctgctatttctatggtacaggaggaagaatgggctgattgggatgaagaaatgcaagctgactctcaattatatgagatttatcaaggaattctgactaaaacagcagagaaaccaggctatgccattcatggaggtaaattgtattacaaggacaggttagtgttgcccagatattcttctagaattcctttacttttaaaagagttacatgattctcctgtgggagggcattcaggtttctttagaacctttaagagggtggctagtgtggtgttttggcaaggcatgaagaaaaatataagggagtatgtagctgagtgtgaagtatgtcaaaggaataaggccagtactttaactccagcagggctactccagcctttgccaattccaactaaggtctggactgatatatccatggattttattgggggcttaccaaaaactcaaggtaaggacactatactagtagtggtggataagttgactaagtatgctcatttttttgcattaagtcaaccctatacagctaaggagattgttgttttatccattaaagaagtggtaaaattacatggatttcttgcttctataatctctgatagagacagattattcatgagtcttttttggaaggaattgtttagaaaggcaggaacccaactaaaaatgagtactgcctatcatccacaaacagatgggcagactgaggtggttaataggtgcttggaagcttatttgaggtgcttaactagaaccaaaccaaagcaatggtctgctcatttagcttgggctgaattttggtttaataccaacttcaacatttctgctaaaatgtctcctttcaaggctttgtatgggcaagaaccacctctattgatcaagggagctgatattccttctaaattgaaagaggttaatcagctgagcaaggacagagatgatttgctgcaggaattgaggaataatttgctaaaagcctaagatcagatgaagagatatgcgaataagcataggagagatttaatttttcaggtaggcgattgggtctttttgaagttgcagccatatagaatgaaatctttggcaaagaaaccaaatgagaagttgagtcttcggttttatggaccatataaggtaacccagaaaataggagaggttgcttataagctggaactgccggacggaagtaagatacatctagtattccatatttcattactcaagaaagcaattaatttcgcttgttctcctcaacctttacctatggctctgaatgagaattgagaacttcaagttcaacccgagaaggtaatgcaaaagagaatttcagaagctggtcaacaggaggtactcattaagtggcagggcttgccacatcatgaagatagttgggagagtgttgatgaaatgaaggctgtttttcctcaattggaccttggggacaaggtccatcttgaaggggagggcattgatagaagtagaagatggggtaatgtgtattccaggaaagctgttagttaatatttctgttaaggtaactaatagttagttacactgttagttaataattctgttagggtaactaatagttagttacaactaactattagttaacagttaggagggaaactataaataagttgtagggagtttaggaggggattcagaaagtaataggaggttggtgatcctcgaaatcacttgtaatagcattaggagttggaagatccagttctcaatacatccgttattctctcttcatctctgtccagttctatcacattatttctcatataacttgcaaaatttattctgaggctaaacctcttttaatcacaaacctacagcctacagcctacctccatattataaaatacaatcaaccttaatttatctataataaaaccatagtaaaataaaattgatcaagggaaggagcacatagtttatcctctataaatatcccaagctcattgactcaagcctaccacaataagaaaaatagtaaaaccccacattcttttacctggcattttgtccccatcggcaccttctagaacctcaaggtagtgaacaaaagacggaaccacaatctcaagcttcccatcactgcaaaacaaaaaggcagacattcaacaaaatgaaaatcacacaaacacaaatcactcaaaaagcaaagcacataaacaatacctgttaatatcagcaatcaagggatttgcatagatgctggaactaacttctgtttgccatctgagctccaaattcttggggcactttgaattcacaagtgcatcctcatctctaaccacgcccataacagaaaaaaaaatcaagagtaattagaagcacaaaatttatatacagttctacaaatacttaggacctgtttggttcccttctaagtctttggtgataaaaaaaaatttctaaaacaatttcacactactcaatcaatttatcatccaaaatctattaaatttaaaaaattgtttctaaaacaatttttttaaaaaccaaatagctaggagatttttctcattttcttttttcagttttcattttgttcaacttctccctcaattccacactctactttgtgccttgcactactcttcaaagttatctgagcaaccttgtttaggtgcattttgaaaactaaaaacagtttttgaaattggaaatcaaacacacccttataggattattctctaattagaattagagtttcaactagacaacaacctttaacacaaaccattgctaagtaggttatcagagtcaaactccaattctattagagaacaacactaaaaccacctaagcaattacatctaaatttcatttcatcctaatcaaaacgtgtgattgttcagcatattctaaataaacaattacttttggtagaaaaagcaatcagcttccaaattaaacaggctaccaaacaagccttaaaatcgaaagccattaagctaatgtatgagacgaaacgaatgtatgaactagtgttccattctctaatctctaagtagaaatagaatttctactcgatacctatgttaacctttaacacaaaccttcattacgcaaattatcagagtcaaactccaattgcattagagaaaaacactaaaccacctaagcagttatatcttagtttcgtcattatcaaaacatgtgattggttcagaatattttaaagaaataacaactattttctcttgctcggtagaagaagtgatccgttcctgaattaaacaggtaaccaaacaagcgataaaatcgaaagccattaagctaatgtatgagttggaagcaatgaatgaattagagttttatactcttattataattagagtttcaactcgataacctatgctaacctttaacacaaacctttattcctcatattatcagagtcaaactccaattctgatcgaagaacaaccactaaaaccacctaggcaattacatctaagtttcacctaattcaaaaaatgtgattgtttcagcacattttaaagaaacaagcattattttctctagctcggtagaaaaaccgatcagttccaaaactaaacaggttaccagacaagccttaaaattgaaagtcgaaagctattaagctaattgcatcatatgatgaaagcaatgaatgaatgagagtgttacatttcggggtatccgagggagtcgtcggaggcttcgcgctcgcggaaggtgtttttcttgctggaatcatcggagagaacgaatgtgatgttgtggagaagtagcagagagagcaaaagaagaagaggatttgtccgcgagcacggtttcatgtcatctactgtggaatgaaaccctagctagcgcggtggcagtagcagggtttctttgggtgcgttcgatctgcaagagtgcgagagttgacggtgatggagagagggggcgttagagttacagtgcagtttattaagaagtaggtacatcagtttcaatcggactcaatatgggagataggttcttttaaaaaattatacatgtacattgtaacggctttccccatttatttgtttattttatcctcaaatttctttgcatgattaaaacaaaaataacatgtacaaatatctatataacaatagatatgatacatataattactctttagtctccacttttatttactcattttactttcaagtatttttaattgtttaaaaccaaaaataacaacaattagtacaaatagaaaatgaaaaatgaaaaatctttgaatagtctctattttcattgagtcaattttgtttatttctctcacttatacccattctcttgtgaataaaagttactcccaactatctgattccttacttctctttcggtactattcttcttctctctctcaatcactctatatatttttttcaattcactctaattttctttttctttagtaaccgcttcgtcgctttctccctctaattattttcttcttttgtttcaacttggctgtgaatttgactattcagtgtgtcgagtaggttatttaatttgtacaaggataagggatggagatttgttttgcttttatgaaattattgttcttattattaaatgtatacttggaatttcatccttgatgattattaattattgcttctagtttttttttctcccaatccatacttgtgtttttttcttcttattattttagtgttgttgtattttgttggaaacccctccataattatggaacatcacattcaaaaaatcttgataacatcaaatgcatgaaaaataaaaggtggagattccaaggttttggaatttcatctgagtcttgatgatatcacattcatcttagaaaaatggagataacattttcaaggattcttgaaaaatatgaaaattaatttacatccatttattactcttggaagaagtcatatccctcgactatataaatgagggcttgtaaggagttgttgaaagcaaacaagtgagatccttcaagagtgacagagtgagagttttttgtaatcctctttaagaaaagagttatattcccaccatacttgatgagtgtttgggaaatattgtaaatcatcctattgggtgagattgagatcattgtaatcctacttcacaatggagatatttgtttttggacttggtcttgtggtttttccctttcatattgaggggattttccacattaaagatttcttgatgttattcttcttctcttactctcttaatttattttcttattgtccatcttaatcacatagagagggaaatttattcttggtattttccaacagtaatcccaccataattatggagcaccacattcaacaaatcttaataacatcacatttatggaaaataaaatgtggagattctaaggttttggaatttcatctttgactcttgatgatatcacattcatctaagaaaaatggagataatattttcaagggttcttggaaatatgaaaattaatttacatttacttatcactcttgggagaagtcatatccctccattatataaatgggggcttgtgaagagttgttgcaaacaagcaagtgagatcatttaagagtgataaagtgagagttttttgtaatccttttcaagaaaagagagttacattttcaccatacttgatgagtgtttgaaaaatattgtaaatcatcgtattgggtgagattgatatcatagtaatcctacttcatagaggagatatttttttctggacttggtcctatgattttttcctttcatactgagggggatttctacattaaaaatttattgatgttgttcttcttctcttactctcttgatatatttctatggttaaaaaacctgcaacagattttacacaaaaacaagaaaaaaaaaacatagcaacagaacaacaagcttgcagtagctaaaccagaaaatagatttgaagcaaacaaagataagaggtagaagatgaacacaagcaattacgtggttcactcacaaggacctacatccacgggaaaagaagcaaaacttatctactatggagcaagagttacaaagatctctgtgtacagtagaatcttgcttgattctttcacggtgtagttaacagcatccaagatcaccaagcctcactctatttctctcatacactccaatcttcctcttatgtgattactgtccttcacactactgcagtgatcacaccgctacctctctatatatagcaataaaggagcactagctatcaagaataaaaactaaaacaggaagctgaaaaatagttagttattgccaccaactaacttatcataaacttgtttataactaatcttgacaggtagcaaactgatatagggacacatcttcacaatcctccacattgtcactagattacaatttgcttcttctcctcacaacatctttactcttcacaaaatccaatcaagtccaagcaatgcttgaactttgattgtggtacagatttggtaagagcatcagcaagattttcttcagttggaatcttctcaaccaaaacctccttggtttcaataacatctcgaatgaagtgtagtcggacatcaatgtgcttggatttctcatggtaaacttgatgttttgaaaactcaattccactttgactatcacagaaaatagtaacactgtcttgaattatcccaagttcacctaccaaccctttgatccatctagcttccttaacagcttttgtaagagcaatgaactcatcctctgttgaagataaagccacaactgattgaaggacaaacctccagccaacagcagtgccaaagaaggtaaacacataagctgataaggatttcctggtatcaatgttaccagcaaaatcaaaatatgtgtaacctttgataggttcttcattcttcatcttctttttgaactttaaaccagaagataatgaaccatttagatatctgaaaatctatttcaaagctccccaatgtgctggtcatgggtctgccatgaacctgctaaccatgttgacagcataggctaaatctggtcttttgcaaaccatgtcatacataatgcttcccactccattagagtaaggaattaatgccatcttttttctttcttcatcaaattttggtgcatccttggttgctagcttgtcatgttgccccaaaggagttgagacatgtttagactcatgcattctaaaatttatcacacctttcttcatatagccttgctgtgacagaaaaagttctccttttgatctatttatgttgatgtctattcctagtatcctcttagccttcccaagttccttcatttcaaattcagagctcaacttatccttgagcctgtcaatttgatccatgctagaacttgccaataagatatcatcaatatacaacagcaaatacaaaagtgcatcttcatctcttttcagaatatacacacaattatcatagttggatctttgaaaattcatcatcatcgtgaagtcatcaaacctcttataccattgcctaggactttgctttaggccatataaggattttcttaacaagcagaccttcccacttaccttagcaaaaccttcaggttgctgcatgtatatggtttcttcaaggtctccatgaaggaaagcagtttttacatctaactactccaattcaaggtcaaactaagtcactatggccagcaatattctgatggaacaatacttcacaacaggtgagaaaatttctttgaaatcaactccttcaacttaagagaaacctcttgcaacaagtcttgctttgaatcttgccttttcaccaccttaaacaccttctttcctcttgaatatccatttgcaccctatcactttctgatttcttggtggatcaactaaaaccctggttttgttcttctcaagagaaagcatttcttcttccatggttgtgatccattcttcactttccttgttattcaaatcttctttgaagtttctaggttcagtagcttgaatttctttagcaactgtcaatgcaaagtaaatcagatcagcttgtccatatcttcttggaggcacaatgtttcttctaactctgtctctagccaagctgttatcattaactgtaggttcaagttgctgatcattttcagtttcctcaacttgaacactctgtgttggtagctccacctcaacttcagcattatctaagttgctgccttgactgctagcttgttgttgatccttagccttcatagctatcctggtttcatcaaaaataacatctttgctaatgatacattttggttcaccaggttccatcctccaaagcttgtaccctttgattccaagtggatatcctataaaagcacatctgatagctctagtcccaagcttgtcttgcttgatatgtgcaaaagctaaagccccaaacactctcaaatttgagttatctgctggttttccactccaaagttccataggtgttttaaaacttaatgctgaagaaggacatctgttgattaagtaggcaatagttgtaacagcttctccccaaaaactttttggtaaacctgcacttaataacatgcatctgaccctttccaggatggttctattcattctttctgccaagccattctgttaaggagtgttagtcactgttttatgcctttagattcctaatttcctacaaaactcattgaattgctctgaaacaaactataggccattgtcagttctcaaacatttaagctttgtttccatttgagtataccattccttaaattttccaaaaagtgtcacttttatttttaagggcgtagatccaaactcttctagagtaatcatcaattatagacaaaaaaataagaacaaccatcataagttatggtccttgttggaccccaaagatcagaatgaacatattcaaaaggtctgtgtacagtatgcacacctactccaaaactagctcttttagcttttcttaaaatgcaataatcacaaaaatgcagtttttctattttatcaccattaagaagattttgttttgctagttcaagtaaaccttttccactaacatgtcctaacctcatatgccataagcaggttttatcatgctgattttgactagcaacggtagcttgtgcaataacaatagaaccatctaggatatacaaaccattcattttaattcctttagcaatcatcatagaatttttaaatattttcatcatgccatgttcaatttgtgtagtgtatcctaaagcatcaaacatgctgatagaaatcgagtttcttttaatttcaggtacataccgtacacctgtcaagagtgtttcttgatcattgaacattttcaatctaactgaacccatgccttggactttacatggcttgttgtttcctagcagcactactccacgttgattcaaaatcagagattcaaagtactcacgccttggacacacatgaaaggtacaacctcaatccataacccaatccttctcaatctcaaagtttgagacaaccagaacatcagcaatttcatactctacttaagcaatgtccacatctcctaattcttgatatttctttgaatcctttcctctcctttcaaggcaatgtctcttcttgtgacagtggaaacatttgaacttgctttaagattgatttctggattttgatctgtgcttatttgacttagagctcctcttttctgatctgcccttcatcacattcaaaccttctgcattgctgtcagttttttattcctatttcctttgcatttccttagttcgaattgatgactgcacttcttcaagagaaatggtttaatcccttccaaacagcatagcatccttaaaatgctcatagctacttggaagtccattaagcaacattaaagctttgtcttcatccttcatcttcacttcaagattcacaagatcatcaagaatcttgttaaattcagcaatttgatctgacaacgttctttcctctgtcatcttgaaagaatagagttgttgtttcaagaaaagttgatttgccactgactttgtcgtgtagagagatttcagcttcaaccaaattgttgcagctgttggttctcttgctacttccctcaaagctttgtctccaagacacaagattattgttctctttgccttttcatttaaatctttcttttctctttcagacattgttgcagggagagaagattcacctttcaaaacatcacccaatccttggtgtatcaacactgcttgcatcttgattctccacaagccaaaatcatttgacccagataacttttcaatgtcaaacttggttgaacccatgaatgatcttcttctctttttcccacagactacgccaattgctatggttaaaaaacctgcaatagattttacacgaaaacaagaaaaaaaaaacatagcaacagaacaacaagcttgcagtagctaaaccagaaaatagatttgaagcaaacaaagataagaggtagaagatgaacacaagcaattaagtggttcaggcacaaggacctacatccacgggaaaagaagcaaaacctatctactatagagaaatagttacaaagatctctgtgtacaatagaatcttgcttgattctttcactatttagttaacaacatccaagatcaccaagcctcactatatctctcccatacactccaatcttcctcttatgtgattactgtccttcacactactgcagtgatcacattgctacctctctatatattgcaataaatgagcactagctatcaagaatataaactaaaacaggaagctgaaaaacagttagttgttggccaccaactaacttatcagaaacttgtttataactaatcttgacagctagcaaactgatatagggacacatcttcacattcttattgtccatcttaatcacatagagagggaaatttattcttggtatttcccaacacattattcattctttctacaattttgatcaaaggcgtttccctcaatgacaagaattttgatacataacacatttttttctctcatgatccttctcctccagtctttcttattactttatgtatttatcctcatttttttattttaactcattcttacatatctttctatattttatttcctttttttgttactaattactgttttaattaatttaacatgtcttttatgggatatgcacttagaattgtgattgtcaacaagaagacaatttatgaaaaaaaaaggggggatgaagaatattttttcaaagccaagattattacggtttgtctatgacaattaattatttttatttttagttgtgctttctagtttgtttttaatttttccatatggagtgtgtcattcattgaacaaaattcagaaattgtaattagaaattattgtagtatattaattcttgacgcaataacacaatgaaaattccgacaaacaggcgcgatagagcccgtgtgtgtatatattattcatcatgatgttgatatgaaatattcatggccagaaataagagtgttagaaatatcttatattgaaaagtataaaaaaaatattttttaaaacaaaaaattgactatatgaaaggacacatttttcctccttgtactttaaaaaaaaaactcattttattgaaataattcgagtaaagcatctacagggattaaaaatgtaagagaatacatgtgatttatataaaaaaaaaaaagtgtaagagaattctctatccaccaaatcaacgaaatttcatctcttttaaagcaattcatgatacatactttgtgtttgatacgcactatagtataggataaagagaacaacacatgataaatacttgagttatgagatttttttttatcatgtatattgtttgatgaagttgttgcaactaatagatatgtgaattcaatgtaaagacaaatatcacaaaaaggggattgaattgtattttaaaatttttctaaacattctttgaaaatcaaagttatcatctgatatagctttaaaagcagataatgtactttttctgaaaaggtacgatcaaacgatgtcaacaaattttataaaaatattttttttcaaaacaaaatcagattcaagttattggtcaatttaaaacaaaagttataagacaaaaagagttcaccaagttctattaactttaaccaaagttacaagtattgttcgctaccacttctggctcttaccaaactaagcttatcctaaagcttaaattgcacctagtctttttttttctaccaagtcactatggctctaaacaaatcttaatcaaaagatttgttgttgttattgatttgttcactgagttgatcttaatgtctcaaagacaattatataaatgaaacacttagtcttttctctcaagacatacaaagtgttttgagagcttttacaatttcagaatttacaaagaaagagcttgaagaagagaatacacagatttgaatttttagcgtgttggttcatagctcgaactcttcaaaatgtcttgtatttgtatgttatcttcagcaagtgtttgttatttctaaacaactttatttactatgttgaaggcttttgtttgaacaattgtccatttgggcaatcattgcacatcctctccatgctaaaacatcattctctttagctttcttgaagcacactttagcataagtcaatgtgtttttgctcatagcaggtatgtcatagcagtagtagcaaacacgtcttttgagatgttgaactttaaaactttgattgttctcttacttctttggacttcaacgaatcctcatcacaatgtttctaagacatttcctgcaaaatgaatctcaaaacaaagtattaaatgaagtcttaaatgcttcatcagaatttaacatttgttcgtctctttctaatctatcaaacataggtacaatgtgtttgtcggattgcatattatatgcaacttttaacttttgtaattatttatatctaatcaaaattattgaggatcctgatttgtcttatgattcaatattcaaaatacatgacatgataagactattgaaattaataggtaatggaaattcaaatgcaatgattcaaattttatatttgtgtttctatagagaaaacatgagtggaaaataagagatatgtaggtacgtgtgtcttttaaatactttgtatttgtgataaaaagttatcccatgattttttgaataatgaaaagttgagtttttgttctatcctcatatgtttaattcatgttgtcccataatcgttgaaggagatgctccctaataacgttcaagaagtttagtttttgtcattcttatatctttttgatgttttagcttctttgttttttcaaaccatttgatgttttagaagtttaaagtctaattaattcatctttctcaaatatatcattatttaatgctcactactagtgatacaagattacatcaaagatcaaggtattaaataagaacattttaaattttaggtcaattaaatatttttggcttaaatatgttggagatccttgaaatatacccgaattttgcaattgatccctaaaaaaaatttgtttcttgttggatcattgaaacttcaaaagttttgtgggagtccttgccattagtctcgtccaaaatgtgatgatatgtctgttagttagacacgtcagacatccaaactagtgaactgcattgtcgacgtccaaatgcgtgaactccatcggcacaatcctcccctcctccctccccacctcttcctctcttcgactggctcttcacccaccccaattgttttttactattttctttctccttttttttgttgtccccttcagctcaccaactcctatagtttcatcgaagatgtgttcttagatctttaaaatatttgtttgggtgaaaatacgatttttaattagaggtatgaatagagtcattgcctcttcacatttgcagtttgccatatcattctttggcaggtgctccggttgggggcaaaggctttgaaatacatgtggtgacgacggaatgacgttatgctcaccagatcaagttgttctaacgccacggttctcctactctacctccctattgtcaatctggttgttttgcaaaaggcaaaccctcagtcaaaaacccatttttagaaaactccaatgcccaataacatctcacatgcaggaagaatcaatgtcgaagaaaatgtcgtcgtgatgttcaatcttttccattgatgggaatacaagatgtagagcaagaaacagaaggagtcaatctacatcgatgtgtttgcatttactgtcgtgaagaggaaaaaccttgcgggatgccgcacctggccatgaatgatgttgatgtcactagcaacggagaagaggacaaagggagaaagaaaaatgtaaaaaataaataaaaatggaggggcagagacgggtgctacaatgagcagataacaaaccgaggagggggaagaagggaggacgataccagtggagccgtggaaggaaggggagatgaggaagctagtaacggtgacgaaggtggtagaggaggaagagatggcgaaggaggagatagtgtagttgaaacgtttggacatctaacgtgacttcatacatgtattgatgacatgttcaactaacggacacatcatcacgttataggagactaataacaaagatctttcacaaaactttagaagtttcagggatcaaatgagaagcgaaaaaattccaaaaatcaattgtaaaattcagatatatttcaaggatctccaacatatttaagccaatattttttaatccatgtacaataaccttaaacataaaaagatatgagaaggaggtaacaattgctggagcatctccttcaacgataatgttatatattatatttctaagtaattattagttcaagtgaacaccaggtgtacataacccagtggtgcgtttcttcttttcttttccttttagaaacactaagtgatcaatttcttccgtttgcgtaaacagacaattttcagaaatgaaaatacgaaagtaatggaactgtaaagcaaagttcaggtgtataaagaatcattgaaaaaaatgaaatttcactgttacatggggtttggtgttgcaaatattcttaatttagtcattcatcatgaaaatgaggctagcaaattaacactggtttctttccacatccatttatctgaaccttaacacattttcaccactgccaaacagttcacacagttgccaccttcctcatccttccatggtagatttccagagctactagtagaatgagtagcagtgactggggtacagtcaaacatgctaagtaacaatctgattcggggcactgatgacacagcctaaacgcatgatatcttccacatccacagaacattagagagaatggaaggcttgttactactactcaaattaatattcacatacaggggaaattctacccatgtaatggaacttgactctaagaaacggctaccctttgaacaacttagaatcactaaaagaaaattgataatatacactgagatttgagattctaaacctaactctcttgatctggacaaccataggcaacggattcaggccggaatttgagccatactaactgcaccatacagctcaacagcacagcaatacttaccgcaaggattaactaattacataatataagcaacttttggttgatggctaaaatacatagccaaaaccaatacaatttcattcaaatcccagagacaaatatcagcggatacactagattttgttttaacttgatgtcacccactaccaccaatgaaaagattgaaggcataaaagtccctgatctgatctaaccaccaccaaatcaccttcgcctcgcgacattagcatgctgattcgctttactatcaattctgatccggtcagcatacatgggaaggcgaattatctcacttatttcattcaacaaatcttcctcagtgatgttatctcttatgcttcgcatcacctacaatgaatgagtaaatggctgaagccaagcacagattaagagaggagaaattagaaaataggagttgggattagaccttcctgtaagtattaaactcatttggagttgatttatctgttctgattcgcatatacttccattccagtttgtcaaaatcccaagaacattcaattatctttccagaataaagtgagggatctgaaccatctgcagagttcaagttttcagcaagcaattgcaacaagtgaaacaaacaagatatagactagaaaatacagactctacaaaacaagacaataacaaatttatcacaaaagaggacaaaatattaaccaaatagtgttttactaaagcactatcccaaaaaaaattgataagaacttctttctgcaacccactttttgctttttgtggggggtaacatattggttattgttacgaaaattgccaatctcaactacaatataaacatgtgtcacactcaataacaaataatagtatgactcggactatatagatttcccattttacaaagcacaccatttttaaaaataaaataaaaaattgtatctatcaaatatagaatgagttaaacagaataagataaaattttgtctgacctgtgaattcaaccctattcccttccaagactttcttctttccacgctcattgagaaaaagtagctcacgatcaccatcaacctgtcaacttaagcaactacaaattagttggctgcatcaaacaacaaactataactgaccaagagatatcacaagtgataccccaacaccatatgaaataaggtggtaaatggccatactacctcaaaaagaaaatcaactgaattcagataagcatatttccacttcaagagtccttcatgagtacgtggtatataaggatcatcccaaccctggtaatcaatattgtcagtaacaacctccattgagtccaatagcaaaacaaagcagaaaaaaacactatgttctttaacaaggatttggaagaaggaatggaccatgtgcctgacctatgaggtagtctaggtacactggtccccttctttcccaaattgtttatcaaacctcacatttcagccacaaaggcatccattatcataaacagcaaaaaaaagggaacagaaaaacagaaaagcaaataaaaaaaggtgacttgccagctaggtacagaacagaaaaatccctttcccatgttcagtacattgaaagggatcattaatcacaacccacctgaaatatgagaccatctgcctcatgtgagagtcttttaatgaattcctttaaaagctttgtaacagtagagagcaaccaaaagtctttcctcctcacctaaacaacattgcaaacatattaatagtgaagccccaaggggaaaatgaagtgaagcttaaagtattttatgaccacttaaggttagagattcataccctgaatggttccaggtcatatctatagtaaggatttctgctctgatatatattgtgtcgttcgtgattcctaggttcaatcacttctttctcaagcatcttccaccgttcatagaagggacgctgcaccaagtttgagctataaatcaacaataatcattcacaactacaaaaacttcatatcaaagactcaggatgacaagaaataaaacagagaaaatagcatatacaagtagaataaaaatgaaaaactatacaaacatttcaaattataattcatcaaaccaaggttatccacaaaagcctcgctcaaaatttcaccatagcatttcttagataaagtcatttgacaaatgaaaatgtgcattcaatactacaaccaatacatattggccattcaacctttattgaccttatttagagctttcaaaggagtcactcataagtgacgccttgatgaacctaaaggaactagacgcagataaaacaataacaacaatagccttatcccatcccactaggggaagtcaactacacagatcacacgtcattaagcttggttaaaatccaaattctcatagatattactcaccatgagaatgagatccctttaataagttcatcttcgttaatttcaccatcaatttgtaatattgatcccataatatacttaaaaactgatagtatgatatccacccaacagtcacataatgttttttactagtaattctgtccatgatatgagcaatttttattagaatagaccttgattatactattatagcgaaatttctgtaatttcttttaaaaatatgaacctaaattaaaaagagaaagaaaaaataaatatattataatacaaaaaaaaggtgtagtttatctcactacaataagtaaagtcaaacaatctagtgggacattagtttaaattcatctgccagttctcaaaagacagtgagaaattatatagacgggcacaggatcttgacattaagaaaagaattgggcagcatttacaatttttacttttttagtattttccaatagtgtgatacaagttaaagataattgcaactgcagacaagtgattttcctatccccaatgtatgaaacagtattagtttaaaacagaaaagagatcatccattattaatttgtgcaattagccaattacatataaaccaaacctctattattgacacttggttgattgccatcatatcatatataaggtatcttctctcctgcttctgtgaatctggcaatgtatcaataaccatctcaccatcaagtaatgtgaagtggtgggtcttctcgcccaaacccttagaacccaaagaaaacattattagtttgtgcatcattaatgtaaaaagagatcttaagattgagaaaaattgtatatctctaggttgatcactgatctcttattcatagtataactacagttaatcaaggagctcattaagagccaataagtagctatgttacagcctaatcccatgctaattaaatcattcatcataactacggttggtgaaggtatttgcctatgtgctacatgtaacactcccactatatgaccagtctagatcataagcatgaagcttgttacaaatggcgaacttctaaagtcattggaaacttctcctcagcccaaatgaaggagaacaccaatggtaaatagaaataatgcttatgcagcaaagttcacaaaatcgggtaggatgtggagttttcatatgatggtggcattgctggttatgaccagtaatactattttaagttcttaggtgtttcattattggagtaaaaagtatttgttgttaaatctgatatggcataataggacccaccaaaatgagttaagaaccaaagaaaggatccagctttatgaattaaaattaaatcagctctaactaacatttttagaaatttcaaatataaagtagtacacgcacatcatttgtacttcggcaaggaaacctcatttggacccttcgaaaattaaaatttctatcaatcaagtaacatccatccattgttattagcatcatatatcttgtaccatctgctttccatgttgcataataatagcgttgtcgtaacaattgcaaattatccctgcatgccaacataaccaaattttatcaaattatggaaacaattgtcagattaataaggaacagtgttgtgaaatcaaaacaactagtaattcacaaatcttaaatggtgcttaaataaattacaattttagcaagagatttaattgttgatacaacaacaaaaacaagagatttagtttatggatttgccctttggccaaatattaaggaataaaaataattatatataatgtaaaatcaattaaggtcttgaaactcataaattattaaattaacagggtgatagagagtaagtaattaatacagattaataagcattatttttatggcatttacagggtgtattttatggtcacggatttgaatatagaaacagtctctttgaataaacaaggggaaggttgtgaacaatgaccctcctcccacataggcctatacattcacgcaacaaggagccttttggcactagggtacgttagtttttatagggtatgtttactgcttttttaaattattagaagcatttatagggggtatttaatgctccttaatcaattcccttagggcacttgttaggaaaaccctatttttatttgtttactcacgttaaccaaacacttggcaaaaaattaagcaacaaaaatttggagataaatttatgtttgtcaactatccaaacctcctatgccgaatctgatttatttgaagagattacaaatgattggttgcctcttgccgtcaccctcctcccacaaacgatgatacaaaaaagttatataaagtataaacatgatggctttaattttctggtagattatggaggcatttaagaaataattcccttacctattttatatgcaactgatagatagggtataaactagttagttatattaaatctttaaacaagagaaatgccaggatataattaaaggtcccatgaaaattaaccactggacaaaactatggaaagaaatatttatattatcctcaatgtcatgcattaatcatttttctagacaaagtaaaagaatgcacattagcaatataatgcaaagcactatgcacaagcatataatggatcaaagcaacaaatacaagtacagtagcaaaataaaaagcagcctacaagtttaatgtataatcaaattaacatatcaaatcacaataagttaatggttcagatagacagaacctgttgagagaaactgggtgtgaacctggaaattgtgtgtgtcccctggcctgcataacaataattagtgaaatagctatgccaagcataggagatacatgaagtaggaaatcattaaaaataaaaagagaaaataaagtgaaataaacagcttttgaaagaataatactaataaagccaatgtgacaaacaataagacataggatcaaatgataacataactagcagcagaatacttaccatcaattcctttattataatgtaattgaataaaaaatggaaagacacaattaagtaataaaactgaatcgttttaattcaacagtcctcaaatataaataataaactcgtgcatgaaagataaccatttaaatggcttaccccaacacccaatttaagtgtttgataacagaactgacgcaatgcatcttgctgatcagtaggtatctcatctcctaaaacatcatcatttgtcatccgtgtgtctgtctcatggttctcctaagagaacaagaaatatgtcaagtttaaaacaagttaaatgccaagtccaatatttctacatgaatattgtcgacattggaaagaaatgagagacataaaatgaaaccgtctgttggaaaaacatagtacattatacacattacatatatacaaatgcacacacacactaattacataataatgtataacataaatcagcccataattattctatttacattcattctaacaaatacaataagaactatatattttatattttattacagacaaatagcgataaatctcaattagagagatcagaatcactcacaaaacaagggggaaaaaaagatagcatactgcagaactttgagggtcaggacctcctaaccctaagtcctcaaattaatcaataactggatgtgctctccccaacctttcccttcccttcttatctttgcttctaacctttgcttcctacccaaatacctcttccacccccatattcatatttccaacaagatatagcgatagcaaaggagtgaacagaatattgtatattaccatcagaggaaaaataatgtatcaagctacttaacaagtgggttgttaaggaatgtaattagataatctggacagacccaaatttaggacagacttcacagtcaaactctcattgtcagacataaaatggattacagcattatttttcttcaattaacatgttcaactgctacagttatggtgcacttggtaggaaaaagaaatggatttgaagaagaattgaaggcatggaaaaaaactttttttataaattacaagaaattttaagacacattttgttttattttatttatagaaaataattattagagaaagggtaaagtacaactagaaggatgagaagacatcctcaaaataagagaggaaaattaagtaaagaatgcaacaaggctgtacaatctatcagaaattaaagcccccttgaaacaatcatgagaaaaaacagatagaagccacaagcataaccctctgccaaaagaaatctagggcaagggggttcttaaaacacacaggtattcaactccaaccatataaaccaaacaacaaacagcatccagacaccaaattttttgtctcctttttctacttaaaccttcaaaacaaaccagcatattggttaatctgaaacagtgtcaaagtaaaggagcacatccaatattcatccagcaagagaaaatagaaaaccccaaaatatcaaaattcatgtgaatgatccatacctgcaaatcagggcctggtactccatcatcatcatcatctggaactgcttcaccattgagatcaaattcagaagatctcttccaatccggagtaggaggacaaactaccatttcaggttttttctcatgataaaatgtgtacaatgcatcaatgtaatcaggtttgtagattcccggagtgcgagcttcagaaaatatttttattgcctacagaaacgggccaatcaagtaacatcttaaacagacaaacagagacagaggcggggggaggagaaccaaagttacaaggtaactccctaactgacctgagtaacagacattgacatagcacgcattagatagtggatgatcatgtatcctgtacgattatgcccatgtgtacaatgaacaagtatatacttttttgagtgcttttgacgtgacaaaaattgtgtaacctggaaatgtaaataattgcatggttaaaaactaataattacttggtatgatcttatggataacttccactgatgtaaagcatatgttctatacaatgaatctacagaaaaaattattaccaaactttacttaaaggataaatgatattataatacatgtcaaatagttttgaaagtttcaagtaccccatttctgaggtaataaagaagttcctacagctacaagtaaacaatgtattctttttcaatccaaggaacataaataatataagttaaagtcttctaactaaataattatggaatagtacaaaatataatatagaaagaacaaacctcatagacaaactggttcacagataaattatcaggtacagaatcacgccccctgcattgaatctaaaccacaacaatgatcttcaaatgtaaggacaagaaagaggtgtcacagttttaaagacaaaaatagcaaaacattgagttcatgagtaaaatttagcaaatgcaaaccttgacatgtttgatgcactctttttttaaatctgacacaggatagtatcgagtggtatttgtcaaatcaatcaccagaccaagctgcaaaccaagagaacaaaacgtaaaaagcagtaaattttatgcaaaaagtctttttgtatgaaacagaacatttaaattctctaaattgttcagctaaggacaagcagcagaaattgtaacagataaaaaacaagaaatagggatcctattttttttttttttcctttttgctaaaaatctagaaattactttcatttagattactcctgctcctaaaataaaaattgaagaaaattcaatgacaaagaagaacaaaaagcagagaaacaaaaatctaaatgaagtattacattttctgaataaattatacttacttttctccctaaaactctttgttgatgtatcacttgtttaaatgagtatcttttaccaggaggaatgcagtcattgaacgattcaccaagtggaaccttagaaggtatcatgcaacaaatttcctggccagatgaagggcaatccaaccaccctacatgtgcatgtgcaaccattgtaatttgtgacatgaaatgtactccaataatcttaaatatgactgaagcaaataaaagaaaattgcatccatctgcattttataaataaaaaacattcatttggaccattcaatccaaagactacccgcctgcccgcccaccctgggcccaaaaaaaactcaaactgcataaaacatataaactaatatttagcaaaatttacttcccaaaaacaaacgttatatagccaaatactatgtgttatagagtgcagattaaggataaccgaaaatacaccataaaatatagcagatggtgttgtaggatatggcagaagcatggtgcagaataaatatataatatatacctacatataaagaataattctaaatcttcctactacatccacctactaattctcctacttcctttgcaaggtaagtattgaatgtgttttataatttccagacattaaatgcattactttttcatttaatactttctttataaggtagtaggaggattagaaggaggaaatagcattactgatatataaataaaaaattgcagaaataaaattgcaacgtagaaaaaataggcataaagctaacaataacaagattcagacttcaaataacaataatatgatatcaaaacaccaatttcaagagttcaaataattacaaaatcagcagccatggtgattgggtggaacagtctcacaaagatcgaagtaaaagataaatagccagaaaggtcaacagatggtcattgcagttgttgggtactgggttcagtcacaaattcagtcactatttgttctgtctcacaaaaatcaaacactcatgttttttttgggggttagacttaatggactcttttataaaacattttgacaggggtttcggtcaggccagagccccaaccccttcttttctttttcatggttttaaaggtttgcggcctgggttcagatcaggcaaaacgataaaacccatttctattcttttttgggtttttaaccattttttgaacagggtatggatcaggtcacatgacccaacccctttgcctctttcttctcaagagacattccaccatggccattgcagacgccatgaactcccagtgtctcacggctgccatagcctgcattgaaaaacctgccatgctactgaatggcaatcggtgggatttatggcaccaccttctgccatagtggtgtcatagccactttttgacaacacttacaatccacgatacaaaataaatccacaaaaatataatttgtcacaagcataaaatcatatgaagaaatatctgaatttagcatcactggttaccagaggcaagacagcaagtggattatggaaagaaactcttacccggaggaagcctgcttttatcatatgatctttggttcttggtatgaaatagctgatcgtatccaggtgactgtgacacatgtacaggtctatcatccggtcgttctctcttcaaccttctctttctttcttcacgctcctaaaaataagcagtaactcaggaattgtgttaatgaaaagacaggtaaaaaaaaaataataataacttgaaaaaactcttattatttgtgaaccccaaagaagcagagcagaacatatgccagatgtatgattggagtctcaaaaagaattattgttcaggaaccgaaccagctctaattaaaatttaacataccacaaacaattttttgggttgtggttttttcagttttaaaaatatctatcaaactttatctgcccattaagcatcatattaattttgcttaatttatacccccgaaagaatcagctaaaagctctctgtacagcattttgattatactcttttttaaacacacgcaaaaacattcaatatgtgaaggaattgcaagatagatagaaaacaatttttactaaaagcctaaattggctcaactcggatgctctgtattcttttaacatttggcaaataaaatttgaattaccctaaattcatctttaatcataaaccatagtttatttattgcaactagcaagatgacaaaatgaagtatttaaagcaattaccaccatcactcattaaaataacaagccagaaacaggctcaactactaacaaacttatgctatcaagtctcaagtaacaaaaatacaaaatgtattcctgctccttcatatgtgcactgcatggatttacatgaatatatgaatatttcaaaaaatggcatagtattggaggcaattgctgatgtttctgtagtatcaacgtagttccataggaagtgtttgacctgacttttttgaaacttaaaagttactttaaatttttaaaatttgaagttaaaagggagctttatatttaaaattaaagatatttcgtaattgcagaactttttattttaagttaaaacttcttgggtaacgtgttaatggattttaggatttaaaaacaaagaaaaaggagaaataaaagccgcaagccccagaaactaacctatttaaaagcttcttttgttaaagttttcctaataaaaaaagaaaaggaaaacttttttaaaagctcattttcttaaaattctatttcactcaatttctccttttaagcagaagggaagtccaatctgagctgggactaatagtctaatactaccttgacatgacaggatatgtggattttagttttccaacagctctaaaaaaatttaatataatttgatattgcgccatgtcagattataatagaggaacctatgtaacaatttgtatccagtgtttacaatatcagggtttgtatctatctttgcaagaactatatgtttcaagctatattcaaaaacagacatgttaagcactaacttagccaggggagatttcagaactttcagttttggaactttttggaaaggactcatttcaagattaccacaccctagaaattcacaatagcgcctggtacttaatcctctatattgttagtttaatgaagaatcttatgttcagaatggtaattattcacaaccaaaaataaaaaaccagacaattaaatgaaattttgtcattaaaccaggagagtgtaggtaggcattacacaaacagcagcacagaaagtcacaagagaaagatatttccaaattaaccaggacctaattccactagatgtgatggtagctgttctgttcagcattaatatcaaatgttcaaatcattataccagaaaaaactagagagatcatgagattgtgcaaataatagtgtatggatagtctatgatacatccatctatctgtcattcaagcattaaatgttcatatcgggatgcatcaatttattacacacataaacaaagaaagtatagggagtatgttatactgactggtcatagaagattttttgaagcatcactttatccctagtaaaattaaaattataagaaaaaatggggtcccatcatcatgcaggttgcaagctgacaaagtcacaatctgacctaatgaaactaggtcatgaaaagaatttcaccagtttatcctataatttgggaaacaaccgttacagtagtcctagcccaaggcaccaagcacatagccaacaaacactgtcactgtcatgatgctaaagagggacaaaaagacaaaaaatatatatatgaagggtacccggcgtgctatatcagctccagtttctatgcgttcttcaggttcatgaaactcttcaacatgtatcttctcctcaaaaatatcttcatcttcctccggaaccggcgaggcattcaagtccatagcaactatcatcaagcatcaagcaacaacattcgccctccacggtataaacctcaacgccctacagcaacatttggtttgtgtgtcagtgattacaacaatcctttagccttcaccattcaaaaacagcaatcctatcaagccagcaagctacaatttccaccattcaaaactctaccagtttatagtcctcgacaaaagtgcaaaatgacttccactaagaaatgctcaagcaatcatgaaaatcaacaaaattattaaaataacccaaaattcaaacttcatggaatagaccttaattatccaaacaccaattttcacaatttaaaaaacaaaaacacgaaattcccacctcgcttcgctttgtctcacattctccaagctcctaggagcaacaactctaaagcagaatcaaaactctcacacacatcaaaattctcggaagcgtcaaatttaacaaaagcaagggcggggaagagtcgaaattcacttacctgaggaaggggaagaatcaaaactcggtcgatcacagactatgatgcaattcgcgcgaggattggaacgctacaatcgtgacaagcagagcgaaagcgagagtgagagttcgcgacgaaaccctagagagagaaagtagaggtggtagagagagaaggggtttgttcgttggggttagagagagagagagagagagagagagtgaggtttgtttgtttgttgctttgtgctattaattgacgaatgagatgaacggagagagagagcgtttagcacttagcaggaagaggccgcagacgaagaatacgcgattcctacctagctagcaaatataaataactaataatttgtaaactaattaacggtttagggttaaaaatgtggtttgatttgtaaatgttaatttatttaagagaaaaggtattatatactcacggtgcattcaataatctattatatataataaattattaatttttaaataattatcttaaaataattcaaataataatttatgataaaatgataatataaaaatattttataatgttaatatataagtgttaaactttttatttaatactttaattaataattaacatatttatttatacatataatttgtgtaattgatgttgaaatattagtatcttcttctttgagaaatattatcgtcaattttaagttgttagttgttacttttatctaagtatattcatttaaatagtaaaatggattcagaaaatattttctttcaacttttgattttcttctgataatgtgtaattgatgtgggtgaatatatatattttttgtttgtgggtggttaaacacataatttcatatattgtcatataaaaattagttaaaacaagtattaaatgaacataaaaaaggtgtacatatattgtttgtgttaggattgaagtttgtaagtgaaaaacatttgaaaagttagatgattaatatatttatgaattgtgttacatggcacatacttatattattaaggctaataagttctgcccctattttttttcttcccataatcttatattattaagactaataagttctgcccatatttttttcttcccattttgcatgcattctccgacccaaattgtgactttcattcaagtaaaatgaatctatacatgcacaagcataatagttaatgaaaatgtcatgttgtataattaaagtatattaaatatattgtggctaatccggctacaacgtacatttcctgttgtggatggttccaatattaatctcatgtattcttattcagcatagcaaaattttattgctccaaaatgagtcaatcacttttatttcatgtatacttataatattttattattaaagctattaagttctgcccaggttttttccctcccattcagcatgcattctcccaccccaaagtgtgactttcattcaccttaaatgaatctatgcaaccacatggataataattaatgaaatgtaattgttacggatatggacgtcccacacccgtatccgtccaattaatgaatcccgccagtcacggattcccccgttaatgatgaacgagcaattgccggccaatatccccaggtcttcggctcaggtatgatggaggaggattctgcggctgccatcccggaggcggaaagccctgctccaggcccagacgaaggcatataaggaaaagacacccaacggtgaaaggtacacactgattattcggacccttctccttcatttcacaccgcacacacagcaccccaattgcctccgtgtcggtgtgatctcgtcctcagtcgttggtctcaccaccatagaccaactgggaggagtcaggtcctacaacaacaccaccggcgacatcgccggacatccctattatcacataacagaacattggcgccgtctgtggggatattcctaccgataaatttcgattcccacctactatcaatggctaacacgagaagacaccacgcagagaggaatggagagccacccaggggggatcgacgagaaaacgtggtggtggaagacgccctttcacacacagattcatcccccatgagaccggatatgccgcccccaggtagtcgacaccaagaggtgcaacatgatgcttcccagcgtttcatacaaaacgctctccagaccctactcaccagattggaaaacttggagaaacgatatgaactacagcggcaggaagatatccaacgcatcaccgcccagttcgaggaacgagacaacagactaagggaggaagagcgacgccaaggtgccgacaaaacaaacagtcgggacctcccggagtcacacggaaggcagagattagtgccatcgtttcacaccgacggaacagggaacgaagatagggcggaacgagaaaggacgcctccgaaggcacaccaggtacactcggccgttgcaccaaacccgacttcgggcggacaggcaagggtaggaccgagcaaagggacttaccaaaggaaataccgtagaggccaccagaacaacagcccgtttgctgaccagatagtcaacgcccagttcctggaagactttgacggatcgttcttgtcaaaatacgatgagagccaggacccacaaatacacatcgatgagttcgatatgcagatgtgcgtacggggcatcgacgaaccggtcatatcgagaatctttgctaccaccctaacgggagcagcccaggtatggttccactcactacctccccgatctatacataactttgaggactttggacagaaattcctgctaaactttgtgatgagcaaaagacaaccgaagtcccagttcgctctagggaagatcagacaaggatcagacgagacgctgcaaagctatttggaccggttcaaggaagcggcgttgcaagttcagggactcgaagagaaggtgcacgtccacctgatctccgccggtctcaacggcgcatcccgcttcgctaagtcgatatacaaggatccggtgaaatccctaaacgaattcaggatgcggtccaagaagtaccttgaactagaacaaatggagatagtaaactcggggccgaaggagggaagaaggcccgcatcgcccagaggccgacgttacgaaaaacaaccgatgggacagaacaatcggcaggtacgaattgaaatatgataaatacacaccactaacagccccacgggggcagatatggcaggaagtagcgttcaccgacatgaggaaagtcgaccgacctccaccgctgataaaaagggaaggaatagactattcccgatattgtgacttccacaatggccccgggcatacaaccgatcaatgctgggaactcagggacgccatagaaaaattcatacgtgaaggcaaattacgacaatatgtcatccagacgcagggacgacaaaacaagaggaaggcagcaccagaaagtaggcaagataagaaaaacagaagagaggaattccctgagccggaattcgaatgcaacgttatcactggggggccaggtggaggaggcgactcagccaaccaaaggaagaaatacctaagggaggtaatggcggtaagggagaaaccacaattcaagggaaggccgaaggagggagtcaagaagtccggaactccgttaatatatttcaccgacgaagacatggaaggtgtgatgccagggcacgaggacggtttggtcataaccggaaccgtggccaactttcgagtcaaaagaatctatgtcgacaatggcagctcggccaacatcatcagtctggatgcatttagaagaatgaacctaaaagacgaagacctgaaaccctgccagaccatgctctacggattcaacggttcagccactagcctgaaggggatgatcgaccttcagcttaccctagggtcgaaagaagggttcagatcggagagggtgacctttacagtggccgacttcccatcccaatataacatcatcctgggaaggccgacgttacacaggtgggacatcatggtatccaccaaacaccagaagatgaagatgatcggccatcggggcgaggtcattactatcaacggagaccagaaggaatcacggcaatgctattacaacactatgagagaattacaaaccggtccatcctctccaccataccttcggaaaggggaaccgaggaagaaccccccagaaggcgacataaggaaaccagtcaacatgattgaactagacctgcgagacgccgaagattggagaccagagccggccgatgaactcgtggacgtccagatcggtccacaccccgggcaggttacgaagataggcaagcagggggactccatattcagagaacgactagttcaatgcttaaagaaaaaccaggacgtcttcgcctggaaagcatcacaaattcccggaatcaacccaaccttttgctgccacaagctagcagtacacccgggatccaggccggtagagcagaagagtaggaagctcggcccggacaggagacaggcattggaaacacacatcggcgagctcattgaggccggctttataagagaaatccagtatacaacttggctctccaacgtcgtcatggtgaagaaatccaatgggaagtagagagtatgcgtcgactataccgacctaaacaaagtttgcccaaaggactcatatccgatgccgaacatcgatcagctggtggacaattcggcaggatacctttggttgtcattcatggatgcttacttcggatacaaccaaattcccatgcacccggccgacaaggagaagactgcattcaggggaatcagtgcaaattattgctacgaggtcatgcctttcggcttgaaaaacgcgggagcaacataccaacggatgatgaacaaggttttttccaaccagatcggacggaacatcgaagtatatatcgatgatatgatcaccaaaacatcggcgaccggagatcatgttcaggatctacaggagacgtttcagaaattaaggcagcacggtatacgtctcaacccgataaaatgcgcatttggagtcagagcggggaagttcctggggtttatgttgactcacaggggaatagaagcaaacccggacaaatgtaaagccatcttagacatgcggctcctgaccagcaaaaaggaagtacaacagctgactggaaggatggcggccctaacccgatttctgcccaaatcggcagaaaaggctttacccttcaaactactaaagaaagaagcgacaatcgagcgaagtccgacgtgcgaagaggccctccagaagatcaagacatgcctatccacacccccagtgttatcaaagcccgagccgggtgaaactctcatattgtacttgtcggtcggcaactaggccatcagtgcagtactagttagggaagaaggtaagacccagcatccaatatacttcatcagccgggtcttaaaagatgcggagctcaggtaccagaaattagaaaaggtggctttcgccctgcttacagcagctaaacggctccgcccatacttccaaagccatacgatagtcgtccgaacaaaccagccgatccgacaggttttgcataaaccggacttggccgggaggatgatgaattgggcgatccagttatccgaatatgatatccgatatgaagcacgccaggccgtcaagtctcaagccttggccgatttcgtcgtagaactgacaccaacgtcgtccgatcaaccagaccaaatgtggaaagtatacgtcgacggatcgtccaacgccaaggggagcggagccggggtcatcgtggagaacccagaaggggtattcttagagcagtcattgcaactcaacttcccaacctccaacaatcaggcggagtacgaagcgttaatcgctgggctactactggcaaaagaacagggggccaccagagtcaacgtctttaccgattctcagcttgtcaccgcacagatcgagggtagatatcagaccaaaggatccctgttggccaaatacttggtaaaagtcaaagaaatcatggcagattttgacgaggtggtagtcgcccatatcccaagagaagaaaacgtcagggccgacatcctatccaaattagccagcaccaaaggaaccacgaaccacagatcggtcattcagcaagaagtatcccagccggcgtgcgttatgaccatctcgggcgacgaagactggaggcaacccctgatcggctatttggaacacgggacagtaccggatgatgaaacagaggcaaaaaagctagtaagaagtgctgcgccatatgtaattataaacggcgaactatatcgacgaggcctccacactccgctgctgctatgcttaagatccgaccaggtcagttatgttttggccgagatacatgaaggaatcaacggccaacacatgggggcgaaagctctggcactgaaggccatacgtgcaggatacttttggccaacaatgaaggcagacgcagaggaccatgtgaggagatgcgatagctgtcagaaacatgcgaggataatccaaacccccccatcggaactgaatttgatcacagccccgtggccgttctataaatggggcatggacctgctaggaccgttcaaggctacagaagggcaaatgagatggctgattgtggccgtggattatttcaccaaatggatcgaagcagaacccctctcttcaatcacctcggcccgcgtccagaaattcatggagcgaaatataatctcgaggtttggcataccggcggagatcgtaacagataatggaacccagttcaccgacggaaagttcagggcaatgacaacaggcctacaaataaaacaccactttgcgtccgtcgaacacccacagtccaacggtcaagccgaagcggccaacaaaaggatgcacgaggcagggtcaaattgggtcgaacagctatattatgtcttatgggcgtaccggacgacggcacagacgtccacaaaggaaaccccattcagaatgacatacggatgcgaagccatgataccagtagaagtcggcgtaccatcctggaggaaacagaacagaggacgaatggacgacaacaatgaagcactggcggtcgacctggacatgatagaagagatccgtgaaacggcacacagccgagacctgctcaacaaaaacaaggtggcaacaaggttcaacaaaaaggtaaaggcacggtcctttgaagaaggcgacctcgtactccgacgagcggacatcggaaacaagaatgccagagatggcaaattggcggcaatctgggagggaccttaccgagttgtcacgaatatcggccaaagagcctacactttagagacgctgaagggtgaatcgatccgacgaacgtggaacgtcgacaaactcaagaaatactacagctaacacccatgtgtttcccattagcaggttctcaacctgtcattgggatcatgggcgacgggttctcctacgaacggcttatatgccacaatatgaccaccagatgtatcatgaatctcatcggccgatccggggaagtagaacccgggaaaaatcgagccgacagatcatgcaaatctcatttcaaatatgaataaaatccttacaaggaattcagttatacaatcgattgttttatttacacgaaacctacgtacgaaaataggtc

(The sequence listing continues in the following parts.)

1. A polypeptide selected from:
(a) a polypeptide comprising the amino acid sequence shown in SEQ ID NO: 5, or any portion thereof, and further comprising a heterologous amino acid sequence attached thereto, wherein expression of the polypeptide or portion thereof in a plant confers increased pathogen resistance on the plant;
(b) an isolated polypeptide having at least 99%, at least 95%, or at least 90% sequence identity with the amino acid sequence of SEQ ID NO: 5, wherein expression of the polypeptide confers increased pathogen resistance on the plant; or
(c) a fusion polypeptide comprising the amino acid sequence of SEQ ID NO: 5, or the polypeptide of (a) or (b).

2. A nucleic acid molecule comprising:
(a) a nucleotide sequence encoding a protein comprising an amino acid sequence having at least 90%, at least 95% or at least 99% sequence identity to SEQ ID NO: 5, wherein said nucleotide sequence comprises a heterologous nucleic acid sequence attached thereto and expression of the nucleic acid molecule in a plant confers increased pathogen resistance on the plant;
(b) an isolated nucleotide sequence encoding a polypeptide having at least 99%, at least 95%, or at least 90% sequence identity with the amino acid sequence of SEQ ID NO: 5, wherein expression of the polypeptide confers increased pathogen resistance on the plant;
(c) the nucleotide sequence of (a) or (b) comprising a sequence of any one of SEQ ID NOS: 2-4 and 11-12; or
(d) the nucleotide sequence of (a) or (b) having at least 99%, at least 95%, or at least 90% sequence identity to any one of SEQ ID NOs: 2-4 and 11-12.

3. An expression cassette comprising the nucleic acid molecule of claim 2.

4. The expression cassette of claim 3, wherein the nucleic acid molecule is operably linked to a promoter capable of directing expression in a plant cell.

5. The expression cassette of claim 4, wherein the promoter is an endogenous promoter.

6. The expression cassette of claim 4, wherein the promoter is an exogenous promoter.

7. The expression cassette of claim 4, wherein the promoter comprises any one of SEQ ID NOS: 13-15.

8. A vector comprising the nucleic acid molecule of claim 2.

9. A transgenic cell comprising the nucleic acid molecule of claim 2.

10. A plant having stably incorporated into its genome a nucleic acid sequence operably linked to a promoter active in the plant, wherein the nucleic acid sequence encodes a polypeptide having:
(a) an amino acid sequence comprising at least 90% sequence identity, to SEQ ID NO: 5; or
(b) an amino acid sequence as set forth in SEQ ID NO: 5,
wherein said nucleic acid sequence is heterologous to the plant, and wherein expression said nucleic acid sequence in the plant results in an increased pathogen resistance as compared to a control plant not comprising the nucleic acid sequence.

11. The plant of claim 10, wherein
(a) the nucleic acid sequence comprises at least 90% identity, or at least 95% identity to any one of SEQ ID NOs: 2-4 and 11-12; or
(b) the nucleic acid sequence is SEQ ID NO: 2, 3, 4, 11 or 12.

12. The plant of claim 10, wherein the nucleic acid sequence is introduced into the genome by transgenic expression.

13. The plant of claim 10, wherein the promoter is an endogenous promoter.

14. The plant of claim 13, wherein the endogenous promoter comprises at least 95% sequence identity to SEQ ID NO: 15, or wherein the endogenous promoter comprises SEQ ID NO: 15.

15. The plant of claim 10, wherein the promoter is a heterologous promoter, and wherein the heterologous promoter comprises at least 95% sequence identity to SEQ ID NO: 13 or 14, or where in the heterologous promoter comprises SEQ ID NO: 13 or 14.

16. The plant of claim 10, wherein the promoter is a constitutive promoter, inducible promoter, or a tissue-specific promoter

17. The plant of claim 10, wherein the plant is a dicot plant.

18. The plant of claim 17, wherein the dicot plant is a soybean plant or an elite soybean plant.

19-20. (canceled)

21. The plant of claim 17, wherein the plant comprises:
(a) an agronomically elite plant having a commercially significant yield and/or commercially susceptible vigor, seed set, standability, threshability, abiotic/biotic resistance, or herbicide tolerance; or
wherein the plant has increased resistance to any one of the following pathogens: soy cyst nematode, bacterial pustule, root knot nematode, frog eye leaf spot, phytophthora, brown stem rot, nematode, Asian Soybean Rust, smut, Golovinomyces cichoracearum, Erysiphe cichoracearum, Blumeria graminis, Podosphaera xanthii, Sphaerotheca fuliginea, Pythium ultimum, Uncinula necator, Mycosphaerella pinodes, Magnaporthe grisea, Bipolaris oryzae, Magnaporthe grisea, Rhizoctonia solani, Phytophthora sojae, Schizaphis graminum, Bemisia tabaci, Rhopalosiphum maidis, Deroceras reticulatum, Diatraea saccharalis, Schizaphis graminum, Myzus persicae, Sclerotinia sclerotiorum, Macrophomina phaseolina, or Fusarium virguliforme.

22. (canceled)

23. The plant of claim 17, wherein the plant is a soybean plant and wherein the soybean plant has increased resistance to ASR as compared to the control plant.

24-32. (canceled)

33. An elite Glycine max plant comprising in its genome a nucleic acid sequence from a donor Glycine plant, wherein the donor Glycine plant is a different strain from the elite Glycine max plant, and wherein the nucleic acid sequence encodes at least one polypeptide having at least 90% identity or 95% identity to SEQ ID NO: 5, wherein said polypeptide confers increased pathogen resistance on the elite Glycine max plant as compared to a control plant not comprising said nucleic acid sequence.

34. The plant of claim 33, wherein the donor Glycine plant is a Glycine tomentella plant, or a progeny thereof.

35. The plant of claim 34, wherein the Glycine tomentella plant is a plant of Glycine tomentella accession line PI505267 or a progeny thereof.

36. The plant of claim 33, wherein the nucleic acid sequence has at least 90% identity, at least 95% identity, or, 100% identity to any one of SEQ ID NOs: 2-4 and 11-12.

37-52. (canceled)

53. A method for producing a transgenic plant with improved resistance against ASR, comprising: introducing the nucleic acid molecule of claim 2 into a recipient plant to obtain a transgenic plant, wherein the transgenic plant has increased resistance against ASR compared to the recipient plant.

54. A method of producing a soybean plant having increased pathogen resistance, the method comprising the steps of:
a) providing a donor soybean plant comprising in its genome heterologous nucleic acid sequence encoding at least one polypeptide having at least 90% identity, at least 95% or 100% identity to SEQ ID NO: 5, wherein expression of said nucleic acid sequence confers to said donor soybean plant increased pathogen resistance as compared to another donor soybean plant not comprising said nucleic acid sequence in its genome;
b) crossing the donor soybean plant of a) with a recipient soybean plant not comprising said nucleic acid sequence; and
c) selecting a progeny plant from the cross of b) by detecting the presence of the nucleic acid sequence, or selecting a plant with increased pathogen resistance, thereby producing a soybean plant having increased pathogen resistance.

55-68. (canceled)

69. A method of conferring increased ASR resistance to a plant, comprising:
a) introducing into the genome of the plant, a nucleic acid molecule operably linked to a promoter active in the plant, wherein the nucleic acid sequence is stably incorporated into the genome, wherein the nucleic acid sequence encodes a polypeptide having
(i) an amino acid sequence comprising at least 90%, or at least 95% identity to SEQ ID NO: 5, or
(ii) an amino acid sequence as set forth in SEQ ID NO: 5,
wherein said nucleic acid sequence is heterologous to the plant, and
wherein expression of said nucleic acid sequence in the plant increases ASR resistance of the plant compared to a control plant not expressing said nucleic acid sequence.

70. The method of claim 69, wherein the nucleic acid sequence is introduced into the genome of the plant by transformation.

71. The method of claim 69, wherein the nucleic acid sequence is introduced into the genome of the plant by crossing a donor plant comprising the nucleic acid sequence with the plant to produce a progeny plant having increased ASR resistance.

72-73. (canceled)

74. The method of any of claim 69, wherein the promoter is an endogenous promoter, and wherein optionally the endogenous promoter comprises SEQ ID NO: 15.

75. (canceled)

76. The method of any one of claim 69, wherein the plant is a dicot plant, and wherein the dicot plant is a soybean plant.

77. (canceled)

78. A plant produced by the method of claim 69.

79-81. (canceled)
